(19) United States
(12) Patent Application Publication
(10) Pub. No.: US 2016/0040163 A1
(43) Pub. Date: Feb. 11, 2016

(54) DNAI FOR THE MODULATION OF GENES

(71) Applicant: PRONAI THERAPEUTICS, INC., Plymouth, MI (US)

(72) Inventors: Wendi Veloso RODRIGUEZA, Plymouth, MI (US); Mina Patel SOOCH, Plymouth, MI (US); Michael WOOLLISCROFT, Plymouth, MI (US); Rachel WEINGRAD, Plymouth, MI (US); Richard Adam MESSMANN, Plymouth, MI (US); Abhishek MANJUNATHAN, Plymouth, MI (US)

(21) Appl. No.: 14/777,214

(22) PCT Filed: Mar. 14, 2014
(86) PCT No.: PCT/US2014/029555

§ 371 Date: Sep. 15, 2015

Related U.S. Application Data
(60) Provisional application No. 61/794,778, filed on Mar. 15, 2013.

(51) Int. Cl. C12N 15/113; A61K 45/06; A61K 31/7088; A61K 9/127

(52) U.S. Cl. CPC C12N 15/113; A61K 9/127; A61K 45/06; A61K 31/7088; C12N 15/1135; C12N 2310/113; C12N 2310/531; C12N 2310/3341

(57) ABSTRACT

The present invention relates to methods and compositions for the inhibition of gene expression. In particular, the present invention provides oligonucleotide-based therapeutics for the inhibition genes implicated in many diseases.

### PRIORITY CLAIM

[0001] This application claims priority to U.S. Provisional Patent Application No. 61/794,778 filed on Mar. 15, 2013. The entire contents of the aforementioned application are incorporated herein by reference.

### FIELD OF THE INVENTION

[0002] The present invention relates to methods and compositions for the inhibition of gene expression. In particular, the present invention provides oligonucleotide-based therapeutics for the inhibition or interference of genes involved and implicated in diseases and cell systems.

### SEQUENCE LISTING

[0003] This application incorporates by reference in its entirety the Sequence Listing entitled “DNAi13728_ST25.txt” (2.90 MB), which was created Mar. 14, 2014 and filed electronically herewith.

### BACKGROUND OF THE INVENTION

[0004] The expression of gene products in cancer, e.g. oncogenes has become the central concept in understanding cancer biology and may provide valuable targets for therapeutic drugs. All oncogenes and their products operate inside the cell making protein-based drugs ineffective since their specificity involves ligand-receptor recognition.

[0005] Aside from oncogenes, proteins implicated in tumor suppression, genesis, progression, growth, proliferation, migration, cell cycle, cell signaling, metastases, invasion, transformation, differentiation, tolerance, vascular leakage, epithelial mesenchymal transition (EMT), aggregation, angiogenesis, adhesion, development of resistance, addiction to oncogenes and non-oncogenes (cytokines, chemokines, growth factors), alteration of immune surveillance or immune response, alteration of tumor stroma/local environment, endothelial activation, extracellular matrix remodeling, hypoxia and inflammation, immune activation or immune suppression, and survival and/or prevention of cell death by apoptosis, necrosis, or autophagy may be useful targets. Proteins implicated may be increased, decreased, or altered to have an impact on diseases and/or cell systems.

[0006] Similarly numerous protein products implicated (overexpressed, mutated, or suppressed) in non-cancerous diseases involving bacterial, cardiovascular (heart failure, atherosclerosis, dylipidemia, etc.), vascular, metabolic, diabetic, dental, oral, dermatological, endocrinology, fungal, gastroenterological, bowel (e.g. Crohn's, Ulcerative Colitis, or inflammatory bowel disease, etc.), genetic, hematological, hepatic, immunology, infections and/or infectious disease, inflammation (e.g. arthritis, etc.), musculosketal, nephrology, neurology (e.g. Alzheimer's, Parkinson's, Huntington's, Multiple Sclerosis, etc.), nutrition and/or weight loss, obstetrics/gynecology, ophthalmology, orthopedics, otolaryngology, pediatric/neonatology, podiatry, pulmonary/respiratory disease, rheumatology, sleep disorders, trauma, urology, stem cells, and viral (e.g. HCV, HIV, HBV, Herpes, etc.) may be useful targets.

[0007] Antisense oligonucleotides are under investigation as therapeutic compounds for specifically targeting oncogenes (Wickstrom, E. (ed). Prospects for antisense nucleic acid therapy of cancer and Aids. New York: Wiley-Liss, Inc. 1991; Murray, J. A. H. (ed). Antisense RNA and DNA New York: Wiley-Liss, Inc. 1992). Antisense drugs are modified synthetic oligonucleotides that work by interfering with ribosomal translation of the target mRNA. The antisense drugs developed thus far destroy the targeted mRNA by binding to it and triggering ribonuclease H (RNase H) degradation of mRNA. Oligonucleotides have a half-life of about 20 minutes and they are therefore rapidly degraded in most cells (Fisher, T. L. et al., Nucleic Acids Res. 21:3857-3865 (1993)). To increase the stability of oligonucleotides, they are often chemically modified, e.g., they are protected by a sulfur replacing one of the phosphate oxygens in the backbone (phosphorothioate) (Milligan, J. F. et al., J. Med. Chem. 36:1923-1937 (1993); Wagner, R. W. et al., Science 260:1510-1513 (1993)). However, this modification can only slow the degradation of antisense and therefore large dosages of antisense drug are required to be effective.

[0008] Despite the optimism surrounding the use of antisense therapies, there are a number of serious problems with the use of antisense drugs such as difficulty in getting a sufficient amount of antisense into the cell, non-sequence-specific effects, toxicity due to the large amount of sulfur containing phosphothioates oligonucleotides and their inability to enter their target cells, and their high cost due to continuous delivery of large doses. An additional problem with antisense drugs has been their nonspecific activities. Improvements to these first generation RNA targeted nucleic acid therapeutics utilize chemical modification to prevent degradation and utilize other modifications (e.g. 2′OMe modifications, CEt, locked nucleic acids (LNA), unlocked nucleic acids, inverted bases, conformationally-restricted nucleic acids (CRN)) to enable therapeutic windows of activity to be improved.

[0009] Other nucleic acid-based approaches beyond antisense also target RNA and its translational machinery rather than genomic DNA. These include double-stranded siRNA to block the translation of abberant proteins, RNA modulation to correct gene defects by exon skipping, and double or single-stranded microRNAs that function to regulate the expression of several gene pathways through the action of miRs and antimiRs, which replace absent sequences or antagonize sequences, respectively.

[0010] There is a need for additional non-protein based cancer therapeutics that target genes implicated in diseases. Therapeutics that are effective in low doses and that are non-toxic to the subject are particularly needed.

### SUMMARY OF THE INVENTION

[0011] The present invention relates to methods and compositions for the interference (inhibition, enhancement or alteration) of gene transcription or gene expression. In particular, the present invention provides oligonucleotide-based therapeutics for the modulation of disease causing genes.

[0012] An oligonucleotide that hybridizes to a non-coding region of a target gene, wherein the oligonucleotide comprises: a length of 20-34 bases; at least one CG pairs; at least 40% C and G content; no more than five consecutive bases of the same nucleotide; and may form at least one secondary structure. This oligonucleotide can also comprise a C and G content of at least 30% and in some embodiments the oligonucleotide comprises a C and G content of from about 50 to 80%. In some embodiments the oligonucleotide comprises at least two CG pairs. In some embodiments the oligonucleotide is complementary of said non-coding region of the target gene. In some embodiments the oligonucleotide is unique to the nucleotide sequence of the non-coding region. In some embodiments the nucleotide sequence of the non-coding region is not duplicated in a genome comprising the target gene. In some embodiments the nucleotide sequence of the non-coding region comprises 60% or greater homology to other nucleotide sequences in a genome with another gene. In some other embodiments the oligonucleotide is complementary to a non-coding region of another gene that influences that target gene. In yet other embodiments the oligonucleotide is complementary to a non-coding region of another gene that influences that target gene due to a chromosomal rearrangement. In yet other embodiments the oligonucleotide is complementary to a region upstream of the transcription start site.

[0013] In some embodiments, the present invention provides a composition comprising one or more distinct oligonucleotides that hybridizes under physiological conditions to regions upstream of the transcription start site of a disease causing gene.

[0014] In some embodiments, the region or regions upstream of the start site are located in regions on, surrounding or near transcription factor binding sites. In other embodiments, the regions are located on, surrounding or near various classes of regulatory elements (promoters, proximal promoters, distal enhancers, activators/co-activators, suppressors) that serve as cis-regulatory elements involved in gene transcription.

[0015] In some embodiments, the present invention provides compositions that are complementary to residues within CG regions. In some other embodiments, the present invention provides compositions that are complementary to residues within CpG islands. In yet other embodiments, the present invention resides in areas within nuclease hypersensitive areas.

[0016] In some embodiments, the present invention provides a composition comprising a first oligonucleotide that hybridizes under physiological conditions to the regulatory region of the target sequences. In some embodiments, at least one of the cytosine bases in the first oligonucleotide is 5-methylcytosine. In some of the embodiments, wherein at least one or all the cytosine bases in said CG pair is 5-methylcytosine. In some embodiments, all of the cytosine bases in the first oligonucleotide are 5-methylcytosine. In yet other embodiments, some of the bases in the first oligonucleotide are modified to prevent nuclease degradation during cell culture experiments. In some preferred embodiments, the hybridization of the first oligonucleotide to the promoter region of a gene modulates expression of the target gene. In some embodiments, the target gene is on a chromosome of a cell, and the hybridization of the first oligonucleotide to the regulatory region of the gene modulates cell signaling pathways of the cell. In some embodiments, the composition further comprises a second oligonucleotide. In some embodiments, at least one (e.g. all) of the cytosines in the second oligonucleotide are 5-methylcytosine.

[0017] In yet other embodiments, the present invention provides a method, comprising: providing an oligonucleotide; and a cell capable of transcription, and a cell capable of gene expression, and comprising a gene capable of being transcribed, and comprising a gene capable of being expressed; and introducing the oligonucleotide to the cell. In some embodiments, the introducing results in the modulation of the gene transcription. In some embodiments, the introducing results in the modulation of expression of the gene. In other embodiments, the introducing results in the modulation of proliferation of the cell. In yet other embodiments, the introducing results in the modulation of the cell phenotype. In certain embodiments, the introducing results in alteration of expression of other genes related to the target gene. In certain other embodiments, the introducing results in modulation of cell signaling pathways related to the target gene transcription. In yet other embodiments, the introducing results in an interference with the expression of other genes involved in transcription. In some embodiments, the cell is a cancer cell. In other embodiments, the cell is a prokaryote. In some other embodiments, the cell is a eukaryote. In some other embodiments the cell is in a host plant. In other embodiments, the cell is in a host animal (e.g., a non-human mammal or a human). In some embodiments, the oligonucleotide is introduced to the host animal at a dosage of between 0.1 mg to 10 g, and preferably at a dosage of between 00.1 mg to 100 mg per kg of body weight or 1 to 500 mg per meter squared body surface area. In some embodiments, the oligonucleotide is introduced to the host animal one or more times per day. In other embodiments, the oligonucleotide is introduced to the host animal continuously. In still further embodiments, the cell is in cell culture. In some embodiments, the method further comprises the step of introducing a test compound to the cell. In some embodiments, the test compound is a known chemotherapy or therapeutic agent. In some embodiments, the cancer is pancreatic cancer, colon/gastric cancer, breast cancer, renal/bladder cancer, lung cancer, leukemia, prostate, lymphoma, ovarian, thyroid cancer, sarcoma, or melanoma. In some embodiments, the non cancer disease involves bacterial, cardiovascular (heart failure, atherosclerosis, dylipidemia, etc.), vascular, metabolic, diabetic, dental, oral, dermatological, endocrinology, fungal, gastroenterological, bowel (e.g. Crohn's, Ulcerative Colitis, or inflammatory bowel disease, etc.), genetic, hematological, hepatic, immunology, infections and/or infectious disease, inflammation (e.g. arthritis, etc.), musculosketal, nephrology, neurology (e.g. Alzheimer's, Parkinson's, Huntington's, Multiple Sclerosis, etc.), nutrition and/or weight loss, obstetrics/gynecology, ophthalmology, orthopedics, otolaryngology, pediatric/neonatology, podiatry, pulmonary/respiratory disease, rheumatology, sleep disorders, trauma, urology, or viral (e.g. HCV, HIV, HBV, Herpes, etc.) disease.

[0018] In some embodiments, the method further provides a drug delivery system. In some embodiments, the drug delivery system comprises a nanoparticle, nanocrystal or complex, (e.g., a liposome comprising a neutral lipid or a lipid like compound or particles comprising polymer or polymer-like compound). In some embodiments, the drug delivery system comprises a cell targeting component (e.g., a ligand or ligand like molecule for a cell surface receptor or a nuclear receptor). In yet other embodiments, the drug delivery system comprises a device to administer the test compound(s). In certain embodiments, the drug delivery system is for use in vivo, and the oligonucleotide and the liposome, nanoparticle, nanocrystal or delivery system are present in the ratio of from 1:1 to 1:1000 (weight per weight).

[0019] The present invention further provides a composition comprising an oligonucleotide that hybridizes under physiological conditions to the coding strand of a gene under conditions such that expression of that gene is inhibited, enhanced or altered (i.e. modulated)

[0020] The present invention further provides a composition comprising an oligonucleotide that hybridizes under physiological conditions to the coding strand of a gene under conditions such that transcription of that gene is inhibited, enhanced or altered (i.e. modulated)

[0021] The present invention further provides a composition comprising an oligonucleotide that hybridizes under physiological conditions to the coding strand of a gene under conditions such that cell signaling pathways related to that gene is inhibited, enhanced or altered (i.e. modulated).

[0022] The present invention additionally provides a composition comprising an oligonucleotide that hybridizes under physiological conditions to the promoter region of a gene on a chromosome of a cell under conditions such that the cell phenotype is altered.

[0023] The present invention additionally provides a composition comprising an oligonucleotide that hybridizes under physiological conditions to the promoter region of a gene on a chromosome of a cell under conditions such that proliferation of the cell is reduced.

[0024] The present invention additionally provides a composition comprising an oligonucleotide that hybridizes under physiological conditions to the CG regions of a gene on a chromosome of a cell under conditions such that cell signaling pathways are modulated.

[0025] The present invention additionally provides a composition comprising an oligonucleotide that hybridizes under physiological conditions to CpG islands of a gene on a chromosome of a cell under conditions such that cell signaling pathways are modulated.

[0026] The present invention additionally provides a composition comprising an oligonucleotide that hybridizes under physiological conditions to the CG regions of a gene on a chromosome of a cell under conditions such that genes related to transcription of that gene are modulated.

[0027] The present invention additionally provides a composition comprising an oligonucleotide that hybridizes under physiological conditions to the CpG islands of a gene on a chromosome of a cell under conditions such that genes related to gene expression of that gene are modulated.

[0028] The present invention additionally provides a composition comprising an oligonucleotide that hybridizes under physiological conditions to the CG regions of a gene on a chromosome of a cell under conditions such that genes related to cell phenotype are modulated.

[0029] The present invention additionally provides a composition comprising an oligonucleotide that hybridizes under physiological conditions to the CpG islands of a gene on a chromosome of a cell under conditions such that genes related to cell phenotype are modulated.

[0030] The present invention additionally provides a method of inhibiting the expression of a gene in a subject (e.g., for the treatment of cancer or other hyperproliferative/overexpressive gene disorders) comprising providing an oligonucleotide that hybridizes under physiological conditions to the coding strand of a gene involved in cancer or a hyperproliferative/overexpressive gene disorder expressed in the biological sample, the oligonucleotide comprising at least on CG dinucleotide pair; and administering the oligonucleotide to the subject under conditions such that transcription or expression of the gene is inhibited, enhanced or altered (i.e. modulated). In some embodiments, the subject is a human.

[0031] In some embodiments, the method further provides a drug delivery system. In some embodiments, the drug delivery system comprises a liposome (e.g., a liposome comprising a neutral lipid or a lipid like compound or particles comprising polymer or polymer-like compound). In some embodiments, the drug delivery system comprises a cell targeting component (e.g., a ligand or ligand like molecule for a cell surface receptor or a nuclear receptor). In certain embodiments, the drug delivery system is for use in vivo, and the oligonucleotide and the liposome, nanoparticle, nanocrystal or delivery system are present in the ratio of from 1:1 to 1:1000 (weight per weight).

[0032] The present invention additionally provides a composition comprising an oligonucleotide that hybridizes under physiological conditions to the promoter region of a gene located on a chromosome of a cell under conditions such that transcription, phenotype or cell signaling pathways related to the target gene are modulated.

[0033] In certain embodiments, the present invention provides a kit comprising an oligonucleotide that hybridizes under physiological conditions to the promoter region of a gene, the oligonucleotide comprising at least one CG dinucleotide pair, wherein at least one of the cytosine bases in the CG dinucleotide pair comprises 5-methylcytosine; and instructions for using the kit for reducing proliferation of a cell comprising a gene on a chromosome of the cell or inhibiting gene expression. In some embodiments, the composition in the kit is used for treating cancer in a subject and the instructions comprise instructions for using the kit to treat cancer in the subject. In some embodiments, the instructions are instructions required by the U.S. Food and Drug Agency for labeling of pharmaceuticals.

[0034] The present invention also provides a method, comprising: providing a biological sample from a subject diagnosed with a cancer; and reagents for detecting the present or absence of expression of a oncogene in the sample; and detecting the presence or absence of expression of an oncogene in the sample; administering an oligonucleotide that hybridizes under physiological conditions to the promoter region of an oncogene expressed in the biological sample, the oligonucleotide comprising at least one CG dinucleotide pair.

[0035] The present invention additionally provides a method of inhibiting the expression of a gene in a subject (e.g., for the treatment of cancer or other hyperproliferative disorders) comprising providing an oligonucleotide that hybridizes under physiological conditions to the promoter region of a gene involved in cancer or a hyperproliferative disorder expressed in the biological sample, the oligonucleotide comprising at least one CG dinucleotide pair; and administering the oligonucleotide to the subject under conditions such that expression of the gene is inhibited. In some embodiments, the subject is a human.

[0036] The present invention additionally provides a method of modulating the transcription of a gene in a subject (e.g., for the treatment of disease) comprising an oligonucleotide that hybridizes under physiological conditions to the non-coding region of a gene involved in disease expressed in the biological sample, the oligonucleotide comprising at least one CG dinucleotide pair; and administering the oligonucleotide to the subject under conditions such that expression of the gene is inhibited. In some embodiments, the subject is a human.

[0037] In yet further embodiments, the present invention provides a method of screening compounds providing a cell comprising a suspected gene; and an oligonucleotide that hybridizes to the promoter region of the gene; and administering the oligonucleotide to the cell; and determining if the phenotype of the cell is modulated in the presence of the oligonucleotide relative to the absence of the oligonucleotide. In some embodiments, the cell is in culture (e.g., a prokaryote or eukaryote cell line). In other embodiments, the cell is in a host animal (e.g., a non-human mammal). In some embodiments, the method is a high-throughput screening method.

[0038] In other embodiments, the present invention relates to methods and compositions for cancer therapy. In particular, the present invention provides nanoparticle, nanocrystal, liposome, or complex based cancer or non-cancer therapeutics.

[0039] Accordingly, in some embodiments, the present invention provides a pharmaceutical composition comprising (e.g., consisting of) a cationic, neutral, or anionic lipids, polymers or delivery agents in a complex or mixture with an oligonucleotide. In some preferred embodiments, the liposome is cationic, neutral, anionic or amphoteric (e.g. SMARTICLES) in charge. In some preferred embodiments, the complex is a mixture of lipids, lipid-like, polymer or polymer-like delivery agents and a cation (e.g. lipids and calcium to form cochleates) or a mixture of lipids lipids, lipid-like, polymer or polymer-like delivery agents and an anion.

[0040] In some embodiments, the present invention provides a kit, comprising an oligonucleotide (e.g., an oligonuculeotide that hybridizes to the CG regions, CpG islands or promoter region of an onocogene) and a first pharmaceutical composition comprising (e.g., consisting of) a cationic, neutral, or anionic liposome comprises an optional second pharmaceutical composition, wherein the second pharmaceutical composition comprises a known chemotherapy agent (e.g., TAXOTERE, TAXOL, or VINCRISTINE, etc.), or chemotherapy cocktail, and wherein the known chemotherapy agent is formulated separately from the first pharmaceutical composition. In some embodiments, the chemotherapy agent is present at less than one half the standard dose, more preferably less than one third, even more preferably less than one fourth and still more preferable less than one tenth, and yet more preferably less than one hundredth the standard dose.

[0041] In some embodiments, the present invention provides a kit, comprising an oligonucleotide (e.g., an oligonuculeotide that hybridizes to the CG regions, CG islands, or promoter region of an onocogene) and a first pharmaceutical composition comprising (e.g., consisting of) a cationic, neutral, or anionic liposome comprises an optional second pharmaceutical composition, wherein the second pharmaceutical composition comprises a known agent (e.g., an antibiotic, an antiviral, an anti-inflammatory, etc.), or treatment cocktail, and wherein the known agent is formulated separately from the first pharmaceutical composition. In some embodiments, the agent is present at less than one half the standard dose, more preferably less than one third, even more preferably less than one fourth and still more preferable less than one tenth, and yet more preferably less than one hundredth the standard dose.

[0042] In yet other embodiments, the present invention provides a method, comprising providing a pharmaceutical composition consisting of a cationic, neutral, or anionic liposome and an oligonucleotide (e.g., an oligonuculeotide that hybridizes to the promoter region of an onocogene); and exposing the pharmaceutical composition to a cancer cell. In some preferred embodiments, the liposome is a cardiolipin based cationic liposome (e.g., NEOPHECTIN). In some preferred embodiments, the charge ration of NEOPHECTIN to oligonucleotide is 6:1. In other embodiments, the liposome comprises N-[1-(2,3-Dioleoyloxy)propyl]-N,N,N-trimethylammonium methyl-sulfate (DOTAP). In some embodiments, the cancer cell is a prostate cancer cell, an ovarian cancer cell, a breast cancer cell, a leukemia cell, or lymphoma cell. In some embodiments, the cell is in a host animal (e.g., a human). In some embodiments, the pharmaceutical composition is introduced to the host animal one or more times per day (e.g., continuously). In some embodiments, the method further comprises the step of administering a known chemotherapeutic agent to the subject (e.g., TAXOTERE, TAXOL, or VINCRISTINE), wherein the known chemotherapeutic agent is formulated separately from the cationic, neutral or anionic liposome. In preferred embodiments, the known chemotherapeutic agent is administered separately from the pharmaceutical composition. In some embodiments, the chemotherapy agent is present at less than one half the standard dose, more preferably less than one third, even more preferably less than one forth and still more preferable less than one tenth, and yet more preferably less than one hundredth the standard dose.

### DESCRIPTION OF THE FIGURES

[0043] FIG. 1 demonstrates a dose-dependent response for representative olionucleotides in MDA-MB-231 a human breast cell line.

[0044] FIG. 2 demonstrates a dose-dependent response for representative olionucleotides in A549 (human lung cell line).

[0045] FIG. 3 demonstrates a dose-dependent response for representative olionucleotides in DU145 (human prostate cell line).

[0046] FIG. 4 demonstrates a dose-dependent response for representative olionucleotides in MCF7 (human mammary breast cell line).

[0047] FIG. 5 depicts the structure of the olionucleotide SU1.

[0048] FIG. 6 depicts the structure of the olionucleotide SU2.

[0049] FIG. 7 depicts the structure of the olionucleotide SU3.

[0050] FIG. 8 depicts the structure of the olionucleotide SU1_{—}02.

[0051] FIG. 9 depicts the structure of the olionucleotide SU1_{—}03.

[0052] FIG. 10 demonstrates target inhibition of representative olionucleotides in DU145 (human prostate cell line).

[0053] FIG. 11 demonstrates target inhibition of representative olionucleotides in HCT-116 (human colorectal carcinoma).

[0054] FIG. 12 depicts the structure of the olionucleotide BE1.

[0055] FIG. 13 depicts the structure of the olionucleotide BE2.

[0056] FIG. 14 demonstrates target inhibition of representative olionucleotides in MDA-MB-231 a human breast cell line.

[0057] FIG. 15 demonstrates target inhibition of representative olionucleotides in DU145 (human prostate cell line).

[0058] FIG. 16 depicts the structure of the olionucleotide ST1.

[0059] FIG. 17 depicts the structure of the olionucleotide ST2.

[0060] FIG. 18 demonstrates target inhibition of representative olionucleotides in MDA-MB-231 a human breast cell line.

[0061] FIG. 19 demonstrates target inhibition of representative olionucleotides in DU145 (human prostate cell line).

[0062] FIG. 20 depicts the structure of the olionucleotide HI1.

[0063] FIG. 21 depicts the structure of the olionucleotide HI2.

[0064] FIG. 22 demonstrates target inhibition of representative olionucleotides in MDA-MB-231 a human breast cell line.

[0065] FIG. 23 demonstrates target inhibition of representative olionucleotides in DU145 (human prostate cell line).

[0066] FIG. 24 depicts the structure of the olionucleotide IL8-1.

[0067] FIG. 25 depicts the structure of the olionucleotide IL8-3.

[0068] FIG. 26 demonstrates target inhibition of representative olionucleotides in BxPC3 (human pancreatic cancer cell line).

[0069] FIG. 27 demonstrates target inhibition of representative olionucleotides in A549 (human lung cancer cell line).

[0070] FIG. 28 depicts the structure of the olionucleotide KR1.

[0071] FIG. 29 depicts the structure of the olionucleotide KR2.

[0072] FIG. 30 depicts the structure of the olionucleotide KR0525.

[0073] FIG. 31 demonstrates target inhibition of representative olionucleotides in MCF7 (human mammary breast cell line).

[0074] FIG. 32 depicts the structure of the olionucleotide IL6.

[0075] FIG. 33 demonstrates target inhibition of representative olionucleotides in HCT-116 (human colorectal carcinoma).

[0076] FIG. 34 depicts the structure of the olionucleotide AKT4

[0077] FIG. 35 demonstrates target inhibition of representative olionucleotides in MCF7 (human mammary breast cell line).

[0078] FIG. 36 depicts the structure of the olionucleotide BC1.

[0079] FIG. 37 demonstrates target inhibition of representative olionucleotides in HCT-116 (human colorectal carcinoma).

[0080] FIG. 38 depicts the structure of the olionucleotide MEK1_{—}1.

[0081] FIG. 39 depicts the structure of the olionucleotide MEK1_{—}2.

[0082] FIG. 40 demonstrates target inhibition of representative olionucleotides in HCT-116 (human colorectal carcinoma).

[0083] FIG. 41 depicts the structure of the olionucleotide MEK2_{—}1.

[0084] FIG. 42 demonstrates target inhibition of representative olionucleotides in MCF7 (human mammary breast cell line).

[0085] FIG. 43 depicts the structure of the olionucleotide WNT1_{—}1.

[0086] FIG. 44 depicts the structure of the olionucleotide WNT1_{—}2.

[0087] FIG. 45 depicts the structure of the olionucleotide WNT1_{—}3.

[0088] FIG. 46 demonstrates target inhibition of representative olionucleotides in MCF7 (human mammary breast cell line).

[0089] FIG. 47 depicts the structure of the olionucleotide EZH2_{—}2.

[0090] FIG. 48 demonstrates target inhibition of representative olionucleotides in MCF7 (human mammary breast cell line).

[0091] FIG. 49 depicts the structure of the olionucleotide PD1.

[0092] FIG. 50 demonstrates target inhibition of representative olionucleotides in MDA-MB-231 a human breast cell line.

[0093] FIG. 51 demonstrates target inhibition of representative olionucleotides in M14 (human melanoma cell line).

[0094] FIG. 52 demonstrates target inhibition of representative olionucleotides in NMuMG (a normal murine mouse mammary gland cell line).

[0095] FIG. 53 depicts the structure of the olionucleotide BL2.

[0096] FIG. 54 demonstrates target inhibition of representative olionucleotides in HCT-116 (human colorectal carcinoma).

[0097] FIG. 55 demonstrates target inhibition of representative olionucleotides in MCF7 (human mammary breast cell line).

[0098] FIG. 56 demonstrates target inhibition of representative olionucleotides in MDA-MB-231 a human breast cell line.

[0099] FIG. 57 demonstrates target inhibition of representative olionucleotides in MCF7 (human mammary breast cell line).

[0100] FIG. 58 depicts the structure of the olionucleotide CM7.

[0101] FIG. 59 depicts the structure of the olionucleotide CM12.

[0102] FIG. 60 depicts the structure of the olionucleotide CM13.

[0103] FIG. 61 depicts the structure of the olionucleotide CM14.

[0104] FIG. 62 demonstrates target inhibition of representative olionucleotides in MCF7 (human mammary breast cell line).

[0105] FIG. 63 depicts the structure of the olionucleotide TNF1.

[0106] FIG. 64 demonstrates target inhibition of representative olionucleotides in MCF7 (human mammary breast cell line).

[0107] FIG. 65 depicts the structure of the olionucleotide MIF1_{—}1.

[0108] FIG. 66 depicts the structure of the olionucleotide MIF1_{—}2.

[0109] FIG. 67 demonstrates that a representative oligonucleotide PC2 is capable of modulating target gene expression.

[0110] The figures are provided by way of example and are not intended to limit the scope of the present invention.

### DETAILED DESCRIPTION OF THE INVENTION

### Definitions

[0111] To facilitate an understanding of the present invention, a number of terms and phrases are defined below:

[0112] As used herein, the term “wherein said chemotherapy agent is present at less than one half the standard dose” refers to a dosage that is less than one half (e.g., less than 50%, preferably less than 40%, even more preferably less than 10% and still more preferably less than 1%) of the minimum value of the standard dosage range used for dosing humans. In some embodiments, the standard dosage range is the dosage range recommended by the manufacturer. In other embodiments, the standard dosage range is the range utilized by a medical doctor in the field. In still other embodiments, the standard dosage range is the range considered the normal standard of care in the field. The particular dosage within the dosage range is determined, for example by the age, weight, and health of the subject as well as the type of cancer being treated.

[0113] As used herein, the term “under conditions such that expression of said gene is modulated” refers to conditions where an oligonucleotide of the present invention hybridizes to a gene) and modulates expression of the gene by at least 10%, preferably at least 25% relative to the level of transcription in the absence of the oligonucleotide. The present invention is not limited to the modulation of expression of a particular gene. Exemplary genes include, but are not limited to Survivin, Beclin-1, STAT3, HIF1A, IL-8, KRAS, MTTP, ApoC III, ApoB, IL-17, MMP2, FAP, P-selectin, IL-6, IL-23, AKT, CRAF, Beta Catenin, PCSK9, MEK1, MEK2, CD4, WNT1, Clusterin, NRAS, EZH2, HDAC1, and PD-1, TNFα, MIF1, TTR, HBV, HAMP, ERBB2, PARP1, ITGA4, APP, FGFR1, CD68, ALK, MSI2, JAK2, CCND1. As used herein, the term “under conditions such that transcription of said gene is modulated” refers to conditions where an oligonucleotide of the present invention hybridizes to a gene and modulates transcription of the gene by at least 10%, preferably at least 25% relative to the level of transcription in the absence of the oligonucleotide. The modulation of transcription of said gene may involve related genes. The present invention is not limited to the modulation of expression of a particular gene.

[0114] As used herein the term “expression” is the process whereby information from a gene is used in the synthesis of a functional gene product. These products may be proteins, but in non-protein coding genes such as ribosomal RNA (rRNA), transfer RNA (tRNA) or small nuclear RNA (snRNA) genes, the product is a functional RNA or transcript to generate the macromolecular machinery for gene expression. Gene expression may be modulated at several levels including transcription, RNA splicing, translation, and post-translational modification of a protein. The term may also be used against a viral gene and refer to mRNA synthesis from a RNA molecule (i.e. RNA replication). For instance, the genome of a negative-sense single-stranded RNA virus may serve as a template to translate the viral proteins for viral replication afterwards.

[0115] As used herein the term “transcription” is the first step of gene expression where a segment of DNA is copied into RNA by RNA polymerase to produce a transcript. If the gene transcribed encodes a protein, the result of transcription is messenger RNA (mRNA) and expressed to produce a protein. Alternatively, a transcribed gene may encode for non-coding RNA genes (e.g. such as microRNA etc.), ribosomal RNA, transfer RNA (tRNA), other components of the protein-assembly process, or other ribozymes.

[0116] As used herein the term “phenotype” describes the modulation of gene expression to define the properties of the expression give rise to the organism's phenotype. A phenotype is expressed by proteins that control the organism's characteristics or traits, such as its morphology, shape, development, biochemical or physiological properties, and products that act to catalyze cell signaling and metabolic pathways characterizing the organism.

[0117] As used herein the term “cell signaling” describes a complex system of signals or pathways that governs cellular activities and coordinates cell actions. A cell's ability to perceive and respond to its environment is processed through proteins involved in the cell signaling pathway.

[0118] As used herein the term “CG regions” are regions of DNA where cytosine and guanine nucleotides are enriched in the linear sequence of bases along the length of a gene. Generally CG or GC percentage that is greater than 50% with an observed-to-expected CpG ratio that is greater than 60%. CG regions of DNA are also where a cytosine nucleotide occurs next to a guanine nucleotide and may be referred to as “CpG” for “C phosphodiester bond G”. Generally cytosine bases in CpGs are methylated.

[0119] As used herein the term “CpG islands” are regions of the genome that have high GC content and higher concentration of CpG sites associated with the start of the gene, promoter regions or regions 5′ upstream of a gene start site. CpG islands are typically 300-3,000 base pairs in length. CpG islands are recognized to be hypomethylated. In most instances the CpG sites in the CpG islands are unmethylated and may be recognized by HpaII restriction site, CCGG.

[0120] As used herein the term “nuclease hypersensitive site” is a short region of chromatin and is detected by its super sensitivity to cleavage by DNase I and other various nucleases. The nucleosomal structure is less compact, increasing the availability of the DNA to binding by proteins, such as transcription factors and DNase I. Hypersensitive sites are found on chromatin of cells associated with genes and generally precede active promoters. When DNA is transcribed, 5′ hypersensitive sites appear before transcription begins, and the DNA sequences within the hypersensitive sites are required for gene expression. Hypersensitive sites may be generated as a result of the binding of transcription factors.

[0121] As used herein “cis-regulatory element” is a region of DNA or RNA that regulates the expression of genes located on that same molecule of DNA A cis-regulatory element may be located upstream of the coding sequence of the gene it controls (in the promoter region or even further upstream), in an intron, or downstream of the gene's coding sequence, in either the translated or the untranscribed region. A cis-regulatory element may be located in another gene other than the target gene in instances of chromosomal rearrangements.

[0122] As used herein “non-coding” refers to a linear sequence of DNA that does not contribute to an amino acid sequence of a protein.

[0123] As used herein “Trinucleotide repeat expansion” refers to a triplet repeat expansion of DNA bases that causes any type of disorder categorized as a trinucleotide repeat disorder. Generally, the larger the expansion the more likely they are to cause disease or increase the severity of disease. Trinucleotide repeat disorders represent genetic by trinucleotide repeat expansion, a kind of mutation where trinucleotide repeats in certain genes exceed the normal, stable threshold, which differs per gene.

[0124] As used herein, the term “under conditions such that growth of said cell is reduced” refers to conditions where an oligonucleotide of the present invention, when administered to a cell (e.g., a cancer) reduces the rate of growth of the cell by at least 10%, preferably at least 25%, even more preferably at least 50%, and still more preferably at least 90% relative to the rate of growth of the cell in the absence of the oligonucleotide.

[0125] As used herein, the term “under conditions such that the expression of said target is modulated” refers to conditions where an oligonucleotide of the present invention, when administered to a cell (e.g., a cancer or non cancer or immune cell) modulates the expression of the protein by at least 10%, preferably at least 25%, relative to basal expression in the absence of the oligonucleotide.

[0126] The term “epitope” as used herein refers to that portion of an antigen that makes contact with a particular antibody.

[0127] As used herein, the term “subject” refers to any animal (e.g., a mammal), including, but not limited to, humans, non-human primates, rodents, and the like, which is to be the recipient of a particular treatment. Typically, the terms “subject” and “patient” are used interchangeably herein in reference to a human subject.

[0128] As used herein, the terms “computer memory” and “computer memory device” refer to any storage media readable by a computer processor. Examples of computer memory include, but are not limited to, RAM, ROM, computer chips, digital video disc (DVDs), compact discs (CDs), hard disk drives (HDD), and magnetic tape.

[0129] As used herein, the term “computer readable medium” refers to any device or system for storing and providing information (e.g., data and instructions) to a computer processor. Examples of computer readable media include, but are not limited to, DVDs, CDs, hard disk drives, magnetic tape and servers for streaming media over networks.

[0130] As used herein, the term “Delta G” or “ΔG” is the change in Gibbs Free Energy (in units of kcal/mole) and is the net exchange of energy between the system and its environment and can be described by the equation ΔG=ΔH−T·ΔS. Where ΔH (Enthalpy) represents the total energy exchange between the system and its surrounding environment (in units of kcal/mole), ΔS (Entropy) represents the energy spent by the system to organize itself (in units of cal/K·mole). Generally speaking a spontaneous system favors a more random system not an ordered system. Finally, T represents the absolute temperature of the system and is in units Kelvin (Celsius +273.15). The change of free energy is equal to the sum of its enthalpy plus the product of the temperature and entropy of the system. A positive ΔG reaction is generally non-spontaneous while a negative value is spontaneous.

[0131] As used herein, the terms “processor” and “central processing unit” or “CPU” are used interchangeably and refer to a device that is able to read a program from a computer memory (e.g., ROM or other computer memory) and perform a set of steps according to the program.

[0132] As used herein, the term “non-human animals” refers to all non-human animals including, but are not limited to, vertebrates such as rodents, non-human primates, ovines, bovines, ruminants, lagomorphs, porcines, caprines, equines, canines, felines, ayes, etc. and and non-vertebrate animals such as drosophila and nematode. In some embodiments, “non-human animals” further refers to prokaryotes and viruses such as bacterial pathogens, fungal, viral pathogens. Non-human animals is used broadly here to also indicate plants and plant genomes, especially commercially valuable crops such as corn, soybean, cotton, the grasses and legumes including rice and alfalfa as well as commercial flowers, vegetables and trees including deciduous and evergreen.

[0133] As used herein, the term “nucleic acid molecule” refers to any nucleic acid containing molecule, including but not limited to, DNA or RNA. The term encompasses sequences that include any of the known base analogs of DNA and RNA including, but not limited to, 4-acetylcytosine, 8-hydroxy-N6-methyladenosine, aziridinylcytosine, pseudoisocytosine, 5-(carboxyhydroxylmethyl) uracil, 5-fluorouracil, 5-bromouracil, 5-carboxymethylaminomethyl-2-thiouracil, 5-carboxymethylaminomethyluracil, dihydrouracil, inosine, N6-isopentenyladenine, 1-methyladenine, 1-methylpseudouracil, 1-methylguanine, 1-methylinosine, 2,2-dimethylguanine, 2-methyladenine, 2-methylguanine, 3-methylcytosine, 5-methylcytosine, N6-methyladenine, 7-methylguanine, 5-methylaminomethyluracil, 5-methoxyaminomethyl-2-thiouracil, beta-D-mannosylqueosine, 5′-methoxycarbonylmethyluracil, 5-methoxyuracil, 2-methylthio-N6-isopentenyladenine, uracil-5-oxyacetic acid methylester, uracil-5-oxyacetic acid, oxybutoxosine, pseudouracil, queosine, 2-thiocytosine, 5-methyl-2-thiouracil, 2-thiouracil, 4-thiouracil, 5-methyluracil, N-uracil-5-oxyacetic acid methylester, uracil-5-oxyacetic acid, pseudouracil, queosine, 2-thiocytosine, and 2,6-diaminopurine.

[0134] The term “gene” refers to a nucleic acid (e.g., DNA) sequence that comprises coding sequences necessary for the production of a polypeptide, precursor, or RNA (e.g., rRNA, tRNA). The polypeptide can be encoded by a full length coding sequence or by any portion of the coding sequence so long as the desired activity or functional properties (e.g., enzymatic activity, ligand binding, signal transduction, immunogenicity, etc.) of the full-length or fragment are retained. The term also encompasses the coding region of a structural gene and the sequences located adjacent to the coding region on the 5′ ends for a distance of about 1 kb or more such that the gene corresponds to the length of the full-length mRNA. Sequences located 5′ of the coding region and present on the mRNA are referred to as 5′ non-translated sequences. Sequences located 3′ or downstream of the coding region and present on the mRNA are referred to as 3′ non-translated sequences. The term “gene” encompasses both cDNA and genomic forms of a gene. A genomic form or clone of a gene contains the coding region interrupted with non-coding sequences termed “introns” or “intervening regions” or “intervening sequences.” Introns are segments of a gene that are transcribed into nuclear RNA (hnRNA); introns may contain regulatory elements such as enhancers. Introns are removed or “spliced out” from the nuclear or primary transcript; introns therefore are absent in the messenger RNA (mRNA) transcript. The mRNA functions during translation to specify the sequence or order of amino acids in a nascent polypeptide.

[0135] As used herein, the term “heterologous gene” refers to a gene that is not in its natural environment. For example, a heterologous gene includes a gene from one species introduced into another species. A heterologous gene also includes a gene native to an organism that has been altered in some way (e.g., mutated, added in multiple copies, linked to non-native regulatory sequences, translocated, etc). Heterologous genes are distinguished from endogenous genes in that the heterologous gene sequences are typically joined to DNA sequences that are not found naturally associated with the gene sequences in the chromosome or are associated with portions of the chromosome not found in nature (e.g., genes expressed in loci where the gene is not normally expressed).

[0136] As used herein, the term “gene expression” refers to the process of converting genetic information encoded in a gene into RNA (e.g., mRNA, rRNA, tRNA, or snRNA) through “transcription” of the gene (i.e., via the enzymatic action of an RNA polymerase), and for protein encoding genes, into protein through “translation” of mRNA. Gene expression can be regulated at many stages in the process. “Up-regulation” or “activation” refers to regulation that increases the production of gene expression products (i.e., RNA or protein), while “down-regulation” or “repression” refers to regulation that decrease production. “Modulation” refers to regulation that is altered. Molecules (e.g., transcription factors) that are involved in up-regulation or down-regulation are often called “activators” and “repressors or suppressors,” respectively.

[0137] In addition to containing introns, genomic forms of a gene may also include sequences located on both the 5′ and 3′ end of the sequences that are present on the RNA transcript. These sequences are referred to as “flanking” sequences or regions (these flanking sequences are located 5′ or 3′ to the non-translated sequences present on the mRNA transcript). The 5′ flanking region may contain regulatory sequences such as promoters and enhancers that control or influence the transcription of the gene. The 3′ flanking region may contain sequences that direct the termination of transcription, post-transcriptional cleavage and polyadenylation.

[0138] The term “wild-type” refers to a gene or gene product isolated from a naturally occurring source. A wild-type gene is that which is most frequently observed in a population and is thus arbitrarily designed the “normal” or “wild-type” form of the gene. In contrast, the term “modified” or “mutant” refers to a gene or gene product that displays modifications in sequence and/or functional properties (i.e., altered characteristics) or phenotype when compared to the wild-type gene or gene product. It is noted that naturally occurring mutants can be isolated; these are identified by the fact that they have altered characteristics (including altered nucleic acid sequences) when compared to the wild-type gene or gene product.

[0139] As used herein, the terms “nucleic acid molecule encoding,” “DNA sequence encoding,” and “DNA encoding” refer to the order or sequence of deoxyribonucleotides along a strand of deoxyribonucleic acid. The order of these deoxyribonucleotides determines the order of amino acids along the polypeptide (protein) chain. The DNA sequence thus codes for the amino acid sequence.

[0140] As used herein, the terms “an oligonucleotide having a nucleotide sequence encoding a gene” and “polynucleotide having a nucleotide sequence encoding a gene,” means a nucleic acid sequence comprising the coding region of a gene or in other words the nucleic acid sequence that encodes a gene product. The coding region may be present in a cDNA, genomic DNA or RNA form. When present in a DNA form, the oligonucleotide or polynucleotide may be single-stranded (i.e., the sense strand) or double-stranded. Suitable control elements such as enhancers/promoters, splice junctions, polyadenylation signals, etc. may be placed in close proximity to the coding region of the gene if needed to permit proper initiation of transcription and/or correct processing of the primary RNA transcript. Alternatively, the coding region utilized in the expression vectors of the present invention may contain endogenous enhancers/promoters, splice junctions, intervening sequences, polyadenylation signals, etc. or a combination of both endogenous and exogenous control elements.

[0141] As used herein, the term “oligonucleotide,” refers to a short length of single-stranded polynucleotide chain. Oligonucleotides are typically less than 200 residues long (e.g., between 8 and 100), however, as used herein, the term is also intended to encompass longer polynucleotide chains (e.g., as large as 5000 residues). Oligonucleotides are often referred to by their length. For example a 24 residue or base oligonucleotide is referred to as a “24-mer”. Oligonucleotides can form secondary and tertiary structures by self-hybridizing or by hybridizing to other polynucleotides. Such structures can include, but are not limited to, duplexes, hairpins, cruciforms, bends, and triplexes.

[0142] In some embodiments, oligonucleotides are “DNAi or DNA interference (DNAi).” As used herein, the term “DNAi” or refers to an oligonucleotide that hybridizes to region 5′ upstream of the transcription start site of a gene. In some embodiments, the hybridization of the DNAi or DNAi to the promoter modulates expression of the gene.

[0143] As used herein, the terms “complementary” or “complementarity” are used in reference to polynucleotides (i.e., a sequence of nucleotides) related by the base-pairing rules. For example, for the sequence “A-G-T,” is complementary to the sequence “T-C-A.” Complementarity may be “partial,” in which only some of the nucleic acids' bases are matched according to the base pairing rules. Or, there may be “complete” or “total” or “100 percent” complementarity between the nucleic acids. The degree of complementarity between nucleic acid strands has significant effects on the efficiency and strength of hybridization between nucleic acid strands. The degree of complementarity is also defined the “native” sequence rather than having a mismatch. This is of particular importance in amplification reactions, as well as detection methods that depend upon binding between nucleic acids.

[0144] As used herein, the term “completely complementary,” for example when used in reference to an oligonucleotide of the present invention refers to an oligonucleotide where all of the nucleotides are complementary to a target sequence (e.g., a gene).

[0145] As used herein, the term “partially complementary,” for example when used in reference to an oligonucleotide of the present invention, refers to an oligonucleotide where at least one nucleotide is not complementary to the target sequence. Preferred partially complementary oligonucleotides are those that can still hybridize to the target sequence under physiological conditions. The term “partially complementary” refers to oligonucleotides that have regions of one or more non-complementary nucleotides both internal to the oligonucleotide or at either end. Oligonucleotides with mismatches at the ends may still hybridize to the target sequence.

[0146] The term “homology” refers to a degree of complementarity. There may be partial homology or complete homology (i.e., identity). A partially complementary sequence is a nucleic acid molecule that at least partially inhibits a completely complementary nucleic acid molecule from hybridizing to a target nucleic acid is “substantially homologous.” The inhibition of hybridization of the completely complementary sequence to the target sequence may be examined using a hybridization assay (Southern or Northern blot, solution hybridization and the like) under conditions of low stringency. A substantially homologous sequence or probe will compete for and inhibit the binding (i.e., the hybridization) of a completely homologous nucleic acid molecule to a target under conditions of low stringency. This is not to say that conditions of low stringency are such that non-specific binding is permitted; low stringency conditions require that the binding of two sequences to one another be a specific (i.e., selective) interaction. The absence of non-specific binding may be tested by the use of a second target that is substantially non-complementary (e.g., less than about 30% identity); in the absence of non-specific binding the probe will not hybridize to the second non-complementary target.

[0147] When used in reference to a double-stranded nucleic acid sequence such as a cDNA or genomic clone, the term “substantially homologous” refers to any probe that can hybridize to either or both strands of the double-stranded nucleic acid sequence under conditions of low stringency as described above.

[0148] A gene may produce multiple RNA species that are generated by differential splicing of the primary RNA transcript. cDNAs that are splice variants of the same gene will contain regions of sequence identity or complete homology (representing the presence of the same exon or portion of the same exon on both cDNAs) and regions of complete non-identity (for example, representing the presence of exon “A” on cDNA 1 wherein cDNA 2 contains exon “B” instead). Because the two cDNAs contain regions of sequence identity they will both hybridize to a probe derived from the entire gene or portions of the gene containing sequences found on both cDNAs; the two splice variants are therefore substantially homologous to such a probe and to each other.

[0149] When used in reference to a single-stranded nucleic acid sequence, the term “substantially homologous” refers to any probe that can hybridize (i.e., it is the complement of) the single-stranded nucleic acid sequence under conditions of low stringency as described above.

[0150] As used herein, the term “hybridization” is used in reference to the pairing of complementary nucleic acids. Hybridization and the strength of hybridization (i.e., the strength of the association between the nucleic acids) is impacted by such factors as the degree of complementary between the nucleic acids, stringency of the conditions involved, the Tm of the formed hybrid, and the G:C or C:G ratio within the nucleic acids. An oligonucleotide is a single molecule that contains a covalent bond linking each nucleotide and often pairing of complementary nucleic acids within its structure is said to be “self-hybridized” or having secondary structure.

[0151] As used herein the term “secondary structure” means a single molecule that contains a pairing of complementary nucleic acids within its structure that contributes to a two dimensional bend in said molecule.

[0152] As used herein, the term “linear section” refers to molecules with secondary structures wherein those secondary structures have regions of DNA that are not paired in a secondary manner they only have one covalent bond to the next oligonucleotide rather than both a bond and a pairing of complementary nucleic acids as one finds in regions having secondary structure.”

[0153] As used herein, the term “nuclease hypersensitive region” refers to regions of the target gene that are susceptible to oligonucleotide binding.

[0154] As used herein, the term “Tm” is used in reference to the “melting temperature.” The melting temperature is the temperature at which a population of double-stranded nucleic acid molecules becomes half dissociated into single strands. The equation for calculating the Tm of nucleic acids is well known in the art. As indicated by standard references, a simple estimate of the Tm value may be calculated by the equation: Tm=81.5+0.41 (% G+C), when a nucleic acid is in aqueous solution at 1 M NaCl (See e.g., Anderson and Young, Quantitative Filter Hybridization, in Nucleic Acid Hybridization [1985]). Other references include more sophisticated computations that take structural as well as sequence characteristics into account for the calculation of Tm. The process of hybridization and dissociation is complex and highly dynamic and at the Tm, double strands are constantly formed and broken up, resulting in multiple interactions over time. The formation of secondary structures within an oligonucleotide may influence Tm.

[0155] As used herein the term “stringency” is used in reference to the conditions of temperature, ionic strength, and the presence of other compounds such as organic solvents, under which nucleic acid hybridizations are conducted. Under “low stringency conditions” a nucleic acid sequence of interest will hybridize to its exact complement, sequences with single base mismatches, closely related sequences (e.g., sequences with 90% or greater homology), and sequences having only partial homology (e.g., sequences with 50-90% homology). Under “medium stringency conditions,” a nucleic acid sequence of interest will hybridize only to its exact complement, sequences with single base mismatches, and closely relation sequences (e.g., 90% or greater homology). Under “high stringency conditions,” a nucleic acid sequence of interest will hybridize only to its exact complement, and (depending on conditions such a temperature) sequences with single base mismatches. In other words, under conditions of high stringency the temperature can be raised so as to exclude hybridization to sequences with single base mismatches.

[0156] “High stringency conditions” when used in reference to nucleic acid hybridization comprise conditions equivalent to binding or hybridization at 42° C. in a solution consisting of 5×SSPE (43.8 g/l NaCl, 6.9 g/l NaH2PO4 H2O and 1.85 g/l EDTA, pH adjusted to 7.4 with NaOH), 0.5% SDS, 5×Denhardt's reagent and 100 μg/ml denatured salmon sperm DNA followed by washing in a solution comprising 0.1×SSPE, 1.0% SDS at 42° C. when a probe of about 500 nucleotides in length is employed.

[0157] “Medium stringency conditions” when used in reference to nucleic acid hybridization comprise conditions equivalent to binding or hybridization at 42° C. in a solution consisting of 5×SSPE (43.8 g/l NaCl, 6.9 g/l NaH2PO4 H2O and 1.85 g/l EDTA, pH adjusted to 7.4 with NaOH), 0.5% SDS, 5×Denhardt's reagent and 100 μg/ml denatured salmon sperm DNA followed by washing in a solution comprising 1.0×SSPE, 1.0% SDS at 42° C. when a probe of about 500 nucleotides in length is employed.

[0158] “Low stringency conditions” comprise conditions equivalent to binding or hybridization at 42° C. in a solution consisting of 5×SSPE (43.8 g/l NaCl, 6.9 g/l NaH2PO4 H2O and 1.85 g/l EDTA, pH adjusted to 7.4 with NaOH), 0.1% SDS, 5×Denhardt's reagent [50×Denhardt's contains per 500 ml: 5 g Ficoll (Type 400, Pharamcia), 5 g BSA (Fraction V; Sigma)] and 100 μg/ml denatured salmon sperm DNA followed by washing in a solution comprising 5×SSPE, 0.1% SDS at 42° C. when a probe of about 500 nucleotides in length is employed.

[0159] The present invention is not limited to the hybridization of probes of about 500 nucleotides in length. The present invention contemplates the use of probes between approximately 8 nucleotides up to several thousand (e.g., at least 5000) nucleotides in length. One skilled in the relevant understands that stringency conditions may be altered for probes of other sizes (See e.g., Anderson and Young, Quantitative Filter Hybridization, in Nucleic Acid Hybridization [1985] and Sambrook et al., Molecular Cloning: A Laboratory Manual, Cold Spring Harbor Press, NY [1989]).

[0160] One skilled in the art would know numerous equivalent conditions may be employed to create low stringency conditions; factors such as the length and nature (DNA, RNA, base composition) of the probe and nature of the target (DNA, RNA, base composition, present in solution or immobilized, etc.) and the concentration of the salts and other components (e.g., the presence or absence of formamide, dextran sulfate, polyethylene glycol) are considered and the hybridization solution may be varied to generate conditions of low stringency hybridization different from, but equivalent to, the above listed conditions. In addition, the art knows conditions that promote hybridization under conditions of high stringency (e.g., increasing the temperature of the hybridization and/or wash steps, the use of formamide in the hybridization solution, etc.) (see definition above for “stringency”).

[0161] As used herein, the term “physiological conditions” refers to specific stringency conditions that approximate or are conditions inside an animal (e.g., a human). Exemplary physiological conditions for use in vitro include, but are not limited to, 37° C., 95% air, 5% CO2, commercial medium for culture of mammalian cells (e.g., DMEM media available from Gibco, Md.), 5-10% serum (e.g., calf serum or horse serum), additional buffers, and optionally hormone (e.g., insulin and epidermal growth factor).

[0162] The term “isolated” when used in relation to a nucleic acid, as in “an isolated oligonucleotide” or “isolated polynucleotide” refers to a nucleic acid sequence that is identified and separated from at least one component or contaminant with which it is ordinarily associated in its natural source. Isolated nucleic acid is such present in a form or setting that is different from that in which it is found in nature. In contrast, non-isolated nucleic acids as nucleic acids such as DNA and RNA found in the state they exist in nature. For example, a given DNA sequence (e.g., a gene) is found on the host cell chromosome in proximity to neighboring genes; RNA sequences, such as a specific mRNA sequence encoding a specific protein, are found in the cell as a mixture with numerous other mRNAs that encode a multitude of proteins. However, isolated nucleic acid encoding a given protein includes, by way of example, such nucleic acid in cells ordinarily expressing the given protein where the nucleic acid is in a chromosomal location different from that of natural cells, or is otherwise flanked by a different nucleic acid sequence than that found in nature. The isolated nucleic acid, oligonucleotide, or polynucleotide may be present in single-stranded or double-stranded form. When an isolated nucleic acid, oligonucleotide or polynucleotide is to be utilized to express a protein, the oligonucleotide or polynucleotide will contain at a minimum the sense or coding strand (i.e., the oligonucleotide or polynucleotide may be single-stranded), but may contain both the sense and anti-sense strands (i.e., the oligonucleotide or polynucleotide may be double-stranded).

[0163] As used herein, the term “purified” or “to purify” refers to the removal of components (e.g., contaminants) from a sample. For example, antibodies are purified by removal of contaminating non-immunoglobulin proteins; they are also purified by the removal of immunoglobulin that does not bind to the target molecule. The removal of non-immunoglobulin proteins and/or the removal of immunoglobulins that do not bind to the target molecule results in an increase in the percent of target-reactive immunoglobulins in the sample. In another example, recombinant polypeptides are expressed in bacterial host cells and the polypeptides are purified by the removal of host cell proteins; the percent of recombinant polypeptides is thereby increased in the sample.

[0164] “Amino acid sequence” and terms such as “polypeptide” or “protein” are not meant to limit the amino acid sequence to the complete, native amino acid sequence associated with the recited protein molecule.

[0165] The term “native protein” as used herein to indicate that a protein does not contain amino acid residues encoded by vector sequences; that is, the native protein contains only those amino acids found in the protein as it occurs in nature. A native protein may be produced by recombinant means or may be isolated from a naturally occurring source.

[0166] The term “mutant protein” as used herein to indicate that a protein containing a change in amino acid residues encoded by vector sequences that renders altered function or implicated in disease; that is, the mutant protein contains only those amino acids found in the protein as it occurs in nature. A mutant protein may be produced by recombinant means or may be isolated from a naturally occurring source

[0167] As used herein the term “portion” when in reference to a protein (as in “a portion of a given protein”) refers to fragments of that protein. The fragments may range in size from four amino acid residues to the entire amino acid sequence minus one amino acid.

[0168] The term “Southern blot,” refers to the analysis of DNA on agarose or acrylamide gels to fractionate the DNA according to size followed by transfer of the DNA from the gel to a solid support, such as nitrocellulose or a nylon membrane. The immobilized DNA is then probed with a labeled probe to detect DNA species complementary to the probe used. The DNA may be cleaved with restriction enzymes prior to electrophoresis. Following electrophoresis, the DNA may be partially depurinated and denatured prior to or during transfer to the solid support. Southern blots are a standard tool of molecular biologists (J. Sambrook et al., Molecular Cloning: A Laboratory Manual, Cold Spring Harbor Press, NY, pp 9.31-9.58 [1989]).

[0169] The term “Northern blot,” as used herein refers to the analysis of RNA by electrophoresis of RNA on agarose gels to fractionate the RNA according to size followed by transfer of the RNA from the gel to a solid support, such as nitrocellulose or a nylon membrane. The immobilized RNA is then probed with a labeled probe to detect RNA species complementary to the probe used. Northern blots are a standard tool of molecular biologists (J. Sambrook, et al., supra, pp 7.39-7.52 [1989]).

[0170] The term “Western blot” refers to the analysis of protein(s) (or polypeptides) immobilized onto a support such as nitrocellulose or a membrane. The proteins are run on acrylamide gels to separate the proteins, followed by transfer of the protein from the gel to a solid support, such as nitrocellulose or a nylon membrane. The immobilized proteins are then exposed to antibodies with reactivity against an antigen of interest. The binding of the antibodies may be detected by various methods, including the use of radiolabeled antibodies.

[0171] As used herein, the term “cell culture” refers to any in vitro culture of cells. Included within this term are continuous cell lines (e.g., with an immortal phenotype), primary cell cultures, transformed cell lines, finite cell lines (e.g., non-transformed cells), and any other cell population maintained in vitro.

[0172] As used, the term “eukaryote” refers to organisms distinguishable from “prokaryotes.” It is intended that the term encompass all organisms with cells that exhibit the usual characteristics of eukaryotes, such as the presence of a true nucleus bounded by a nuclear membrane, within which lie the chromosomes, the presence of membrane-bound organelles, and other characteristics commonly observed in eukaryotic organisms. Thus, the term includes, but is not limited to such organisms as fungi, protozoa, and animals (e.g., humans).

[0173] As used herein, the term “in vitro” refers to an artificial environment and to processes or reactions that occur within an artificial environment. In vitro environments can consist of, but are not limited to, test tubes and cell culture. The term “in vivo” refers to the natural environment (e.g., an animal or a cell) and to processes or reaction that occur within a natural environment.

[0174] The terms “test compound” and “candidate compound” refer to any chemical entity, pharmaceutical, drug, and the like that is a candidate for use to treat or prevent a disease, illness, sickness, disorder of bodily function (e.g., cancer or non-cancer disease) or disrupt a system (e.g. cell culture). Test compounds comprise both known and potential therapeutic compounds. A test compound can be determined to be therapeutic by screening using the screening methods of the present invention. In some embodiments of the present invention, test compounds include antisense compounds.

[0175] As used herein, the term “known chemotherapeutic agents” refers to compounds known to be useful in the treatment of disease (e.g., cancer). Exemplary chemotherapeutic agents affective against cancer include, but are not limited to, daunorubicin, dactinomycin, doxorubicin, bleomycin, mitomycin, nitrogen mustard, chlorambucil, melphalan, cyclophosphamide, 6-mercaptopurine, 6-thioguanine, cytarabine (CA), 5-fluorouracil (5-FU), floxuridine (5-FUdR), methotrexate (MTX), colchicine, vincristine, vinblastine, etoposide, teniposide, cisplatin, lenolamide, and diethylstilbestrol (DES).

[0176] As used herein, the term “sample” is used in its broadest sense. In one sense, it is meant to include a specimen or culture obtained from any source, as well as biological and environmental samples. Biological samples may be obtained from animals (including humans) and encompass fluids, solids, tissues, and gases. Biological samples include blood products, such as plasma, serum and the like. Environmental samples include environmental material such as surface matter, soil, water, crystals and industrial samples. Such examples are not however to be construed as limiting the sample types applicable to the present invention.

[0177] “Hot Zones” in some embodiments, are regions within the promoter region of an oncogene are further defined as preferred regions for hybridization of oligonucleotides. In some embodiments, these preferred regions are referred to as “hot zones.” In some preferred embodiments, hot zones are defined based on oligonucleotide compounds that are demonstrated to be effective (see above section on oligonucleotides) and those that are contemplated to be effective based on the preferred criteria for oligonucleotides described above. Preferred hot zones encompass 20 bp upstream and downstream of each compound included in each hot zone and have at least 1 CG or more within an increment of 40 bp further upstream or downstream of each compound. In preferred embodiments, hot zones encompass a maximum of 100 bp upstream and downstream of each oligonucleotide compound included in the hot zone. In additional embodiments, hot zones are defined at beginning regions of each promoter. These hot zones are defined either based on effective sequence(s) or contemplated sequences and have a preferred maximum length of 1000 bp. Based on the above described criteria, exemplary hot zones were designed. Specific hot zones are described in the examples.

[0178] Combination and Single-Agent Therapy Using this DNAi Technology.

[0179] We present and define the following disease conditions as exemplary of, but not limited to, those that are potentially treatable with the DNAi therapeutic(s) described herein. Treatment of these disease entities may occur with single-agent DNAi therapy or DNAi therapy in combination with one or more therapeutics used to treat the conditions.

[0180] Cardiovascular Disease

[0181] Treating cardiovascular disease involves opening narrowed arteries, correcting abnormalities associated with irregular heartbeats and dysfunctional heart muscle or valves, reducing high blood pressure and high lipid levels, and amending imbalances in clotting that causes symptoms of pain and discomfort. Inventions may include: medical devices, dyslipidemics, antithrombotics, anticoagulants, anti-platelets, antihypertensives, anti-inflammatory, antihypertrophics, diuretics, anti-anginal, channel blockers, anti-restenosis agents, anti-atherosclerotics, anti-arrhythmics, enzyme inhibitors, and complement inhibitors.

[0182] Antianginals

[0183] The heart muscle works continuously and requires a constant supply of nutrients and oxygen. Those nutrients and oxygen are carried to the heart muscle in the blood. The chest pain known as angina can occur when there is an insufficient supply of blood, and consequently of oxygen, to the heart muscle. There are several types of antianginal medications. These include beta blockers (acebutolol, atenolol, betaxolol, bisoprolol, labetalol, metoprolol, nadolol, pindolol, propranolol, timolol), calcium channel blockers (diltiazem, nifedipine, verapamil), and vasodilators (nitroglycerin, isosorbide dinitrate). These drugs act by increasing the amount of oxygen that reaches the heart muscle.

[0184] Antiarrhythmics

[0185] Antiarrhythmics are used when the heart does not beat rhythmically or smoothly (a condition called arrhythmia), its rate of contraction must be regulated. Antiarrhythmic drugs (disopyramide, mexiletine, procainamide, propranolol, amiodarone, tocainide) prevent or alleviate arrhythmias by altering nerve impulses in the heart. Anticoagulants are used when clots develop on the interior wall of an artery block blood flow.

[0186] Antihyperlipidemics

[0187] Medications for treating atherosclerosis, or hardening of the arteries, act to reduce the serum levels of cholesterol and triglycerides, which form plaques on the walls of arteries. The following drug classes are used to treat high cholesterol or high lipid levels: HMG CoA reductase inhibitors (atorvastatin, simvastatin, lovastatin, and rosuvastatin, fluvastatin, pravastatin), fibrates (fenofibrate, gemfibrozil), bile acid sequestrants (cholestyramine, colestipol, and colesevelam), niacins (niacin, Vit B3, nicotinic acid), and cholesterol absorption inhibitors (ezetimide), or drug combinations of these classes.

[0188] Antihypertensives

[0189] High blood pressure is caused when the pressure of the blood against the walls of the blood vessels is higher than what is considered normal. High blood pressure, or hypertension, eventually causes damage to the brain, eyes, heart, or kidneys. Several different drug actions produce an antihypertensive effect. Some drugs block nerve impulses that cause arteries to constrict; others slow the heart rate and decrease its force of contraction; still others reduce the amount of a certain hormone in the blood that causes blood pressure to rise. The effect of any of these medications is to reduce blood pressure. The mainstay of antihypertensive therapy is often a diuretic, a drug that reduces body fluids. Examples of antihypertensive drugs include beta blockers, calcium channel blockers, ACE (angiotensin-converting enzyme) inhibitors (including benazepril, captopril, enalapril, lisinopril, and quinapril), and the agents valsartan, losartan, prazosin, and terazosin.

[0190] Antiplatelets

[0191] Antilatelet drugs alter the platelet activation at the site of vascular damage crucial to the development of arterial thrombosis. Aspirin irreversibly inhibits the enzyme COX, resulting in reduced platelet production of TXA2 (thromboxane—powerful vasoconstrictor that lowers cyclic AMP and initiates the platelet release reaction). Dipyridamole inhibits platelet phosphodiesterase, causing an increase in cyclic AMP with potentiation of the action of PGI2-—opposes actions of TXA2. Clopidogrel (Plavix) affects the ADP-dependent activation of IIb/IIIa complex. Glycoprotein IIb/IIIa receptor antagonists block a receptor on the platelet for fibrinogen and von Willebrand factor and include for example, abciximab eptifibatide and tirofiban. Epoprostenol is a prostacyclin that is used to inhibit platelet aggregation during renal dialysis (with or without heparin) and is also used in primary pulmonary hypertension.

[0192] Antithrombotics

[0193] An antithrombotic agent is a drug that reduces thrombus formation. These include plasminogen activators: Alteplase, Reteplase, Tenecteplase, Saruplase, Urokinase, Anistreplase, Monteplase, Streptokinase, other serine endopeptidases (Ancrod, Brinase, Fibrinolysin)

[0194] Beta Blockers

[0195] Beta-blocking medications block the response of the heart and blood vessels to nerve stimulation, thereby slowing the heart rate and lowering blood pressure. They are used in the treatment of a wide range of diseases, including angina, high blood pressure, migraine headaches, arrhythmias, and glaucoma. Metoprolol and propranolol are common beta blockers.

[0196] Calcium Channel Blockers

[0197] Calcium channel blockers (diltiazem, nifedipine, verapamil) are used for the prevention of angina (chest pain). Verapamil is also useful in correcting certain arrhythmias (heartbeat irregularities) and lowering blood pressure. This group of drugs is thought to prevent angina and arrhythmias and lower blood pressure by blocking or slowing calcium flow into muscle cells, which results in vasodilation (widening of the blood vessels) and greater oxygen delivery to the heart muscle.

[0198] Cardiac Glycosides

[0199] Cardiac glycosides include drugs that are derived from digitalis (digoxin is an example). This type of drug slows the rate of the heart but increases its force of contraction. Cardiac glycosides act as both heart depressants and stimulants: They may be used to regulate irregular heart rhythm or to increase the volume of blood pumped by the heart in heart failure.

[0200] Diuretics

[0201] Diuretic drugs, such as chlorothiazide, chlorthalidone, furosemide, hydrochlorothiazide, and spironolactone, promote the loss of water and salt from the body to lower blood pressure or increase the diameter of blood vessels. Antihypertensive medications cause the body to retain salt and water and are often used concurrently with diuretics. Most diuretics act directly on the kidneys, but there are different types of diuretics, each with different actions. This allows therapy for high blood pressure to be adjusted to meet the needs of individual patients.

[0202] Thiazide diuretics, such as chlorothiazide, chlorthalidone, and hydrochlorothiazide, are the most commonly prescribed and generally well tolerated as once or twice a day pills. A major drawback of thiazide diuretics is that they often deplete the body of potassium and therefore compensated with potassium supplements. Loop diuretics, such as furosemide, act more vigorously than thiazide diuretics. (Loop refers to the structures in the kidneys on which these specific diuretic medications act.) Loop diuretics promote more water loss than thiazide diuretics but they also deplete more potassium from the body. Potassium sparing diuretics are also used treat heart failure and high blood pressure and include amiloride, spironolactone, and triamterene. Generally drug combinations of amiloride and hydrochlorothiazide, spironolactone and hydrochlorothiazide, and triamterene and hydrochlorothiazide are used to enhance the antihypertensive effect and reduce potassium loss.

[0203] Vasodilators

[0204] Vasodilating medications cause the blood vessels to dilate, or widen. Some of the antihypertensive medications, such as hydralazine and prazosin, lower blood pressure by dilating the arteries or veins. Other vasodilating medicines are used in the treatment of stroke and diseases that are characterized by poor blood circulation. Ergoloid mesylates, for example, are used to reduce the symptoms of senility by increasing the flow of oxygen-rich blood to the brain.

[0205] Metabolic Disease (Diabetes)

[0206] Diabetes is usually a lifelong or chronic disease caused by high levels of sugar in the blood. Insulin is a produced by the pancreas to control blood sugar and diabetes can be caused by too little insulin, resistance to insulin, or both. There are several types of diabetes. (1) Type 1 diabetes can occur at any age, but it is most often diagnosed in children, teens, or young adults. It is caused by the destruction of islet cells in the pancreas resulting in little or no insulin thereby requiring daily injections of insulin. (2) Type 2 diabetes results from insulin resistance and relative insulin deficiency. Obesity is thought to be the primary cause of Type 2 diabetes in those genetically predisposed. (3) Gestational diabetes is high blood sugar that develops at any time during pregnancy in a woman who does not have diabetes.

[0207] The following treatments for diabetes include: insulin, biguanides (metformin), suphonylureas, nonsulfonylurea secretagogues, meglitinides/prandial glucose regulatory/glinides, alpha-glucosidase inhibitors, thiazolidineione/glitazones, glucagon-like peptide-1 analog, amylin analogues, and dipeptidyl peptidase-4 inhibitors.

[0208] Metformin is generally recommended as a first line treatment. When metformin is not sufficient another class is added.

[0209] Sulfonylureas lower blood sugar by stimulating the pancreas to release more insulin. The first drugs of this type that were developed—Dymelor (acetohexamide), Diabinese (chlorpropamide), Orinase (tolbutamide), and Tolinase (tolazamide)—are not as widely used since they tend to be less potent and shorter-acting drugs than the newer sulfonylureas. They include Glucotrol (glipizide), Glucotrol XL (extended release), DiaBeta (glyburide), Micronase (glyburide), Glynase PresTab (glyburide), and Amaryl (glimepiride). These drugs can cause a decrease in the hemoglobin A1c (HbA1c) of up to 1%-2%. Biguanides improve insulin's ability to move sugar into cells especially into the muscle cells and prevent the liver from releasing stored sugar. Biguanides are counterindicated in people who have kidney damage or heart failure because of the risk of precipitating a severe build-up of lactic acid (called lactic acidosis) in these patients. Biguanides can decrease the HbA1c 1%-2%. An example includes metformin (Glucophage, Glucophage XR, Riomet, Fortamet, and Glumetza).

[0210] Thiazolidinediones improve insulin's effectiveness (improving insulin resistance) in muscle and in fat tissue. They lower the amount of sugar released by the liver and make fat cells more sensitive to the effects of insulin. Actos (pioglitazone) and Avandia (rosiglitazone) are the two drugs of this class. A decrease in the HbA1c of 1%-2% can be seen with this class of oral diabetes medications. Thiazolidinediones should used with caution in people with heart failure. Avandia is restricted for use in new patients only if they are uncontrolled on other medications and are unable to take Actos.

Alpha-glucosidase inhibitors include Precose (acarbose) and Glyset (miglitol). These drugs block enzymes that help digest starches, slowing the rise in blood sugar. These diabetes pills may cause diarrhea or gas. They can lower hemoglobin A1c by 0.5%-1%.

[0211] Meglitinides include Prandin (repaglinide) and Starlix (nateglinide). These diabetes medicines lower blood sugar by stimulating the pancreas to release more insulin. The effects of these drugs are glucose-dependent, with high blood sugar inducing insulin release, which is unlike the action of sulfonylureas which cause insulin release, regardless of glucose levels, and can lead to hypoglycemia.

[0212] Dipeptidyl peptidase IV (DPP-IV) inhibitors include Januvia (sitagliptin), Nesina (alogliptin), Onglyza (saxagliptin), Galvus (vildagliptin) and Tradjenta (linagliptin). The DPP-IV inhibitors work to lower blood sugar in patients with type 2 diabetes by increasing insulin secretion from the pancreas and reducing sugar production. These diabetes pills increase insulin secretion when blood sugars are high. They also signal the liver to stop producing excess amounts of sugar. DPP-IV inhibitors control sugar without causing weight gain. The medication may be taken alone or with other medications such as metformin.

[0213] Glucagon-Like Peptide Analogs and Agonists

[0214] Glucagon-like peptide (GLP) agonists bind to a membrane GLP receptor. As a consequence, insulin release from the pancreatic beta cells is increased. Examples of this class include Exenatide (also Exendin-4, marketed as Byetta). Exenatide is not an analogue of GLP but rather a GLP agonist. Typical reductions in A1C values are 0.5-1.0%. Liraglutide, a once-daily human analogue (97% homology), has been developed by Novo Nordisk under the brand name Victoza. Taspoglutide is presently in Phase III clinical trials with Hoffman-La Roche.

[0215] Alpha-glucosidase inhibitors (Acarbose, Miglitol, Voglibose), amylin analogues (Pramlintide), SGLT2 inhibitors (Canagliflozin, Dapagliflozin, Empaliflozin, Remogliflozin, Sergliflozin) and others (Benfluorex, Tolrestat)

[0216] Combination agents are the combination of two medications in one tablet and include the following examples: Glucovance, which combines glyburide (a sulfonylurea) and metformin, Metaglip, which combines glipizide (a sulfonylurea) and metformin, and Avandamet which utilizes both metformin and rosiglitazone (Avandia). Kazano (alogliptin and metformin) and Oseni (alogliptin plus pioglitazone) are other examples.

[0217] Eye Disorders

[0218] Ocular Bacterial Infection. Antibiotics are generally used to treat, or sometimes to prevent a bacterial eye infection. Examples of common antibiotics used in the eye are sulfacetamide, erythromycin, gentamicin, tobramycin, ciprofloxacin and ofloxacin.

[0219] Ocular Inflammatory reaction. Anti-inflammatories reduce inflammation, which in the eye is usually manifest by pain, redness, light sensitivity and sometimes blurred vision. Anti-inflammatories can be either glucocorticoids/corticosteroids or NSAIDs. Corticosteroids are very effective anti-inflammatories for a wide variety of eye problems including all disorders associated with systemic inflammatory reactions (Reiter's syndrome, xerostomia, etc.). Common corticosteroids include: Prednisolone, Fluorometholone and Dexamethasone. Non-steroidal anti-inflammatories reduce the production of pro-inflammatory factors such as prostaglandins. Common NSAIDs include: Diclofenac, Ketorolac and Flurbiprofen.

[0220] Glaucoma. Glaucoma is a disorder of regulation of intraocular pressure. Glaucoma medications all attempt to reduce this pressure to prevent damage to the optic nerve resulting in loss of vision. These medications may lower pressure by decreasing the amount of fluid produced in the eye, by increasing the amount of fluid exiting through the eye's natural drain, or by providing additional pathways for fluid to leave the eye. More than one glaucoma medication is used simultaneously, as these effects can combine to lower pressure further than possible with a single medication. These medications are listed by class:

### BETA-BLOCKERS: Timolol, Metipranolol, Carteolol, Betaxolol, Levobunolol

### ALPHA AGONISTS: Brimonidine, Iopidine

### PROSTAGLANDIN ANALOGUES: Latanoprost

### CARBONIC ANHYDRASE INHIBITORS: Dorzolamide

### CHOLINERGIC AGONISTS: Pilocarpine, Carbachol

### ADENERGIC AGONISTS, Epinephrine, Dipivefrin

[0221] Ocular Viral Infection

[0222] Used primarily in treating herpes virus infections of the eye, antiviral eye medications may be used in conjunction with oral medications for elimination the virus. The most common type of antiviral is triflurthymidine. Other topical anti-virals include adenine arabinoside and idoxuridine.

[0223] Allergic Reaction

[0224] All anti-allergy topicals decrease the effects of histamine, a factor that mediates, the inflammatory reaction. Common anti-allergy medicines include livostin, patanol, Cromolyn and alomide.

[0225] Infectious Diseases

[0226] Aminoglycosides. This class of antibiotics is used to treat infections caused by Gram-negative bacteria, such as Escherichia coli and Klebsiella, particularly Pseudomonas aeruginosa. This class is also effective against Aerobic bacteria (but not obligate/facultative anaerobes) and in the treatment of tularemia. The mechanism of action includes binding to the bacterial 30S ribosome/ribosomal subunit (some work by binding to the 50S subunit), inhibiting the translocation of the peptidyl-tRNA from the A-site to the P-site and also causing misreading of mRNA, leaving the bacterium unable to synthesize proteins vital to its growth. Possible toxicities include hearing loss, vertigo and nephrotoxicity. Examples of aminoglycosides include Amikacin, Gentamicin, Kanamycin, Neomycin, Netilmicin, Tobramycin, Paromomycin, Spectinomycin.

[0227] Ansamycins. Used as anti-tumor antibiotics and for treatment of traveler's diarrhea caused by E. coli. Examples include Geldanamycin, Herbimycin, and Rifaximin.

[0228] Carbacephem. This class prevents bacterial cell division by inhibiting cell wall synthesis. An example is Loracarbef.

[0229] Carbapenem. This class works by inhibiting cell wall synthesis. It is bactericidal for both Gram-positive and Gram-negative organisms and therefore useful for empiric broad-spectrum antibacterial coverage. (Note MRSA resistance to this class.). Toxicity may include gastrointestinal upset and diarrhea, nausea, seizures, headache, rash and allergic reactions. Examples include Ertapenem, Doripenem, Imipenem/Cilastatin, Meropenem.

[0230] Cephalosporins (First generation). Have the same mode of action as other beta-lactam antibiotic to disrupt the synthesis of the peptidoglycan layer of bacterial cell walls. The class provides good coverage against Gram positive infections. Potential toxicities include gastrointestinal upset and diarrhea, nausea (if alcohol taken concurrently) and allergic reactions. Examples include Cefadroxil, Cefazolin, Cefalotin, Cefalothin, Keflin, and Cefalexin.

[0231] Cephalosporins (Second generation). This class provides less gram-positive coverage than the above with improved gram negative cover. They have the same mode of action as other beta-lactam antibiotics and disrupt the synthesis of the peptidoglycan layer of bacterial cell walls. They may cause gastrointestinal upset and diarrhea, nausea (if alcohol taken concurrently) and allergic reactions. Examples include: Cefaclor, Cefamandole, Cefoxitin, Cefprozil and Cefuroxime.

[0232] Cephalosporins (Third generation). Same mode of action as other beta-lactam antibiotic to disrupt the synthesis of the peptidoglycan layer of bacterial cell wall. Provides improved coverage of Gram-negative organisms, except Pseudomonas. Has reduced Gram-positive coverage. May cause gastrointestinal upset and diarrhea, nausea (if alcohol taken concurrently and allergic reactions. Examples include Cefixime, Cefdinir, Cefditoren, Cefoperazone, Cefotaxime, Cefpodoxime, Ceftazidime, Ceftibuten, Ceftizoxime, and Ceftriaxone.

[0233] Cephalosporins (Fourth generation). As above for mechanism and toxicity but good coverage for pseudomonal infections. Examples include Cefepime.

[0234] Cephalosporins (Fifth generation). As above for mechanism and toxicity but good coverage for Methicillin-resistant Staphylococcus aureus/MRSA. Examples include Ceftaroline fosamil, and Ceftobiprole.

[0235] Glycopeptides Inhibit peptidoglycan synthesis and are active against aerobic and anaerobic Gram positive bacteria including MRSA; Vancomycin is used orally for the treatment of C. difficile. Examples include Teicoplanin, Vancomycin, and Telavancin

[0236] Lincosamides. Bind to 50S subunit of bacterial ribosomal RNA thereby inhibiting protein synthesis. Used to treat serious staph-, pneumo-, and streptococcal infections in penicillin-allergic patients, also anaerobic infections; clindamycin topically used for acne and possible C. difficile-related pseudomembranous enterocolitis. include Clindamycin and Lincomycin.

[0237] Lipopeptides. Bind to the membrane and cause rapid depolarization, resulting in a loss of membrane potential leading to inhibition of protein, DNA and RNA synthesis Gram-positive organisms. Example is Daptomycin.

[0238] Macrolides. Are enzyme inhibitors of bacterial protein biosynthesis by binding reversibly to the subunit 50S of the bacterial ribosome, thereby inhibiting translocation of peptidyl-tRNA. Used to treat Streptococcal infections, syphilis, upper respiratory tract infections, lower respiratory tract infection, mycoplasmal infections, Lyme disease. Can cause nausea, vomiting, and diarrhea (especially at higher doses), prolonged QT interval (especially erythromycin) and Jaundice. Examples include Azithromycin, Clarithromycin, irithromycin, Erythromycin, Roxithromycin, Troleandomycin, Telithromycin and Spiramycin.

[0239] Monobactams. Same mode of action as other beta-lactam antibiotics, to disrupt the synthesis of the peptidoglycan layer of bacterial cell walls. Example includes Aztreonam.

[0240] Nitrofurans. Are used to treat bacterial or protozoal diarrhea or enteritis. An example is Furazolidone and Nitrofurantoin to treat urinary tract infections.

[0241] Oxazolidonones. Protein synthesis inhibitors, they prevent the initiation step and are used to treat vancomycin-resistant Staphylococcus aureus. Can cause thrombocytopenia, and peripheral neuropathy. Examples include Linezolid, Radezolid,

[0242] Penicillins. Disrupt the synthesis of the peptidoglycan layer of bacterial cell walls.

These are used to treat a wide range of infections; penicillin is used for streptococcal infections, syphilis and Lyme disease and can cause gastrointestinal upset and diarrhea, allergy with serious anaphylactic reaction, brain and kidney damage (rare). Examples include, Amoxicillin, Ampicillin, Azlocillin, Carbenicillin, Cloxacillin, Dicloxacillin, Flucloxacillin, Mezlocillin, Methicillin, Nafcillin, Oxacillin, Penicillin G, Penicillin V, Piperacillin, Penicillin G, Temocillin, Ticarcillin.

[0243] Penicillin combinations. The second component prevents bacterial antibiotic resistance to the first component. Examples include Augmentin, Ampicillin/sulbactam, Piperacillin/tazobactam, Ticarcillin/clavulanate.

[0244] Polypeptide antibiotics. For treatment of eye, ear or bladder infections; usually applied directly to the eye or inhaled into the lungs; rarely given by injection, although the use of intravenous colistin is experiencing a resurgence due to the emergence of multi drug resistant organisms. This class can cause kidney and nerve damage (when given by injection). The class inhibits isoprenyl pyrophosphate, a molecule that carries the building blocks of the peptidoglycan bacterial cell wall outside of the inner membrane. Examples include Bacitracin, Colistin, and Polymyxin B

[0245] Quinolones. For treatment of urinary tract infections, bacterial prostatitis, community-acquired pneumonia, bacterial diarrhea, mycoplasmal infection, gonorrhea. Can cause nausea (rare), irreversible damage to central nervous system (uncommon), tendinosis (rare). The class works by inhibiting the bacterial DNA gyrase or the topoisomerase IV enzyme, thereby inhibiting DNA replication and transcription. Examples include, Ciprofloxacin, Enoxacin, Gatifloxacin, Levofloxacin, Lomefloxacin, Moxifloxacin, Avelox, Nalidixic acid, Norfloxacin, Ofloxacin, Trovafloxacin, Grepafloxacin, Raxar, Sparfloxacin and Temafloxacin.

[0246] Sulfonamides. They are competitive inhibitors of the enzyme dihydropteroate synthetase, DHPS. DHPS catalyses the conversion of PABA (para-Aminobenzoic acid) to dihydropteroic acid|dihydropteroate, a key step in folate synthesis. Folate is necessary for the cell to synthesize nucleic acids (nucleic acids are essential building blocks of DNA and RNA, and in its absence cells will be unable to divide. The class is used to treat Urinary tract infections (except sulfacetamide, used for Conjunctivitis, and mafenide and silver sulfadiazine, used topically for burns. The class can cause nausea, vomiting, and diarrhea, Allergy, including skin rashes, crystals in urine, Renal failure, decrease in white blood cell count and sensitivity to sunlight. Examples include Mafenide, Sulfacetamide, Sulfadiazine, Silver sulfadiazine, Sulfadimethoxine, Sulfamethizole, Sulfamethoxazole, Sulfanilimide, Sulfasalazine, Sulfisoxazole, and Trimethoprim-Sulfamethoxazole.

[0247] Tetracyclines Inhibit the binding of aminoacyl-tRNA to the mRNA-ribosome complex. They do so mainly by binding to the 30S ribosomal subunit in the mRNA translation complex. Can be used to treat Syphilis, Chlamydia infections, Lyme disease, mycoplasmal infections, acne, rickettsial infections, and malaria caused by a protest and not a bacterium. Toxicity includes Gastrointestinal upset, Sensitivity to sunlight, Potential toxicity to mother and fetus during pregnancy, Enamel hypoplasia (staining of teeth; potentially permanent, transient depression of bone growth. Examples include Demeclocycline, Doxycycline, Minocycline, Oxytetracycline, and Tetracycline.

[0248] Drugs against mycobacteria include the following: Clofazimine, Dapsone, Capreomycin, Cycloserine, Ethambutol, Ethionamide, Isoniazid, Pyrazinamide, Rifampicin, Rifabutin, Rifapentine, Streptomycin, and aminoglycosides.

[0249] Other antibiotics include the following:

[0250] Arsphenamine, Chloramphenicol, Fosfomycin, Fusidic acid, Metronidazole, Mupirocin, Platensimycin, Quinupristin/Dalfopristin, Thiamphenicol, Tigecycline, Tinidazole, and Trimethoprim. Anti-Viral Medications by Indication

[0251] Herpes Simplex Virus (HSV), Varicella Zoster Virus (VZV) and cytomegalovirus (CMV). Oral herpes simplex virus (HSV) causes mucous membrane lesions (i.e., cold sores), and genital HSV causes genital herpetic lesions. Treatment for HSV can also be used for the treatment of Varicella Zoster Virus (VZV) the causative agent for chicken-pox in children and shingles in adults. Typical anti-virals include Acyclovir and Valaciclovir, both inhibitors of viral DNA synthesis. Additionally, Idoxuridine and Brivudin can be incorporated into the viral DNA leading to a hindered mechanism of DNA duplication. A third type of herpes viruses with established treatment is cytomegalovirus (CMV), particularly dangerous for unborn children, infants and immune-compromised patients. Medications used to treat CMV are Ganciclovir and Foscarnet, also indicated in some HSV infections. They act to inhibit viral DNA synthesis.

[0252] HIV. A diverse group of antiviral medications control viral load, but cannot cure HIV infections. Viral entry inhibitors such as Enfuvirtide prevent newly formed viruses from entering uninfected host cells by preventing virus-cell fusion.

[0253] Reverse transcriptase inhibitors include many drugs such as Abacavir, Lamivudine, Zidovudine, Tenofovir, Efavirenz and Nevirapine. These drugs inhibit reverse transcriptase, an enzyme critical to the mechanism by which HIV transcribes genetic material.

Another anti-viral approach utilizes the protease inhibitors such as Atazanavir, Indinavirn and Ritonavir to inhibit assembly of new viruses. Combination therapies using 2 or 3 of the aforementioned agents are very effective at reducing serum viral load to below detectable levels.

[0254] Hepatitis. One of the few anti-HBV (hepatitis B) medications is Lamivudine, a reverse transcriptase inhibitor. Additionally, adefovir and dipivoxil, medications used in the treatment of HIV can be used to inhibit transcription of viral HBV RNA into DNA. Interferons are naturally occurring molecules that stimulate immune responses against invading species, including viral particles. Imiquimod up-regulates the natural production of interferons to boost the human immune response. Synthetically produced Alpha-interferon is also effective in treating HBV and HCV, especially in combination with other drugs. Unfortunately, interferons are associated with a number of severe toxicities that limit their long-terms usage in a number of patients.

[0255] Broad-spectrum Antiviral Medications

[0256] Ribavirin is effective in the treatment of influenza, HCV and paramyxoviruses such as measles and respiratory syncytial virus by blocking synthesis of viral RNA. A combination of Ribavirin and Alfa-interferon is proven to be effective in treatment of chronic hepatitis C infections.

[0257] Inflammation. Anti-Inflammatory medications by class

[0258] Glucocorticoids. This class of anti-inflammatory medication reduces inflammation by binding to glucocorticoid receptors (GR). The activated GR complex, in turn, up-regulates the expression of anti-inflammatory proteins in the nucleus (a process known as transactivation) and represses the expression of pro-inflammatory proteins in the cytosol by preventing the translocation of other transcription factors from the cytosol into the nucleus. These drugs are often referred to as corticosteroids. Examples include Budesonide, cortisone, dexamethasone, hydrocortisone, methylprednisolone, prednisolone and prednisolone.

[0259] Non-steroidal anti-inflammatory drugs (NSAIDs). NSAIDs reduce inflammation by reducing the production of prostaglandins, chemicals that promote inflammation, pain, and fever. Prostaglandins also protect the lining of the stomach and intestines from the damaging effects of acid, and promote blood clotting by activating blood platelets and affect kidney function. The enzymes that produce prostaglandins are called cyclooxygenase (COX). There are two types of COX enzymes, COX-1 and COX-2. Both enzymes produce prostaglandins that promote inflammation, pain, and fever; however, only COX-1 produces prostaglandins that activate platelets and protect the stomach and intestinal lining. NSAIDs block COX enzymes and reduce production of prostaglandins. Therefore, inflammation, pain, and fever are reduced. Since the prostaglandins that protect the stomach and promote blood clotting also are reduced, NSAIDs can cause ulcers in the stomach and intestines, and increase the risk of bleeding. Aspirin is the only NSAID that inhibits the clotting of blood for a prolonged period of time, four to seven days, and is therefore effective for preventing blood clots that cause heart attacks and strokes. Ketorolac is a very potent NSAID and is used for treating severe pain that normally would be managed with narcotics. Ketorolac causes ulcers more frequently than other NSAIDs and should not be used for more than five days. Celecoxib blocks COX-2 but has little effect on COX-1. Therefore, celecoxib is sub-classified as a selective COX-2 inhibitor, and it causes fewer ulcers and less bleeding than other NSAIDs. Commonly prescribed NSAIDs include aspirin, salsalate, celecoxib, diclofenac, etodolac, ibuprofen, indomethacin, ketoprofen, ketorolac, nabumetone, naproxen, oxaprozin, piroxicam, sulindac and tolmetin.

[0260] Neurological Diseases

[0261] Huntington's Disease and dyskinesias. Chorea is an abnormal involuntary movement disorder, one of a group of neurological disorders called dyskinesias, which are caused by overactivity of the neurotransmitter dopamine in the areas of the brain that control movement. Chorea is characterized by brief, irregular contractions that are not repetitive or rhythmic, but appear to flow from one muscle to the next. Chorea often occurs with athetosis, which adds twisting and writhing movements. Chorea is a primary feature of Huntington's disease, a progressive, hereditary movement disorder that appears in adults, but it may also occur in a variety of other conditions. Syndenham's chorea occurs in a small percentage (20 percent) of children and adolescents as a complication of rheumatic fever. Chorea can also be induced by drugs (levodopa, anti-convulsants, and anti-psychotics) metabolic and endocrine disorders, and vascular incidents. There is currently no standard course of treatment for chorea. Treatment depends on the type of chorea and the associated disease. Treatment for Huntington's disease is supportive, while treatment for Syndenham's chorea usually involves antibiotic drugs to treat the infection, followed by drug therapy to prevent recurrence. Adjusting medication dosages can treat drug-induced chorea. Metabolic and endocrine-related choreas are treated according to the cause(s) of symptoms.

[0262] Parkinson's Disease. Parkinson's disease (PD) belongs to a group of conditions called motor system disorders, which are the result of the loss of dopamine-producing brain cells. The four primary symptoms of PD are tremor, or trembling in hands, arms, legs, jaw, and face; rigidity, or stiffness of the limbs and trunk; bradykinesia, or slowness of movement; and postural instability, or impaired balance and coordination. PD usually affects people over the age of 50. Other symptoms may include depression and other emotional changes; difficulty in swallowing, chewing, and speaking; urinary problems or constipation; skin problems; and sleep disruptions. There are currently no blood or laboratory tests that have been proven to help in diagnosing sporadic PD. Therefore the diagnosis is based on medical history and a neurological examination. The disease can be difficult to diagnose accurately. There is no cure for PD, but a variety of medications are used to relieve symptoms. Patients are given levodopa combined with carbidopa. Carbidopa delays the conversion of levodopa into dopamine until it reaches the brain. Nerve cells can use levodopa to make dopamine and replenish the brain supply. Anticholinergics may help control tremor and rigidity. Other drugs, such as bromocriptine, pramipexole, and ropinirole, mimic the role of dopamine in the brain, causing the neurons to react as they would to dopamine. An antiviral drug, amantadine, also appears to reduce symptoms. Rasagiline can be used along with levodopa for patients with advanced PD or as a single-drug treatment for early PD. In some cases, surgery may be appropriate if the disease doesn't respond to drugs. A therapy called deep brain stimulation (DBS) has now been approved by the U.S. Food and Drug Administration. In DBS, electrodes are implanted into the brain and connected to a small electrical device called a pulse generator that can be externally programmed. DBS can reduce the need for levodopa and related drugs, which in turn decreases the involuntary movements called dyskinesias that are a common side effect of levodopa. It also helps to alleviate fluctuations of symptoms and to reduce tremors, slowness of movements, and gait problems. DBS requires careful programming of the stimulator device in order to work correctly.

[0263] Amyotrophic Lateral Sclerosis. Amyotrophic lateral sclerosis (ALS), sometimes called Lou Gehrig's disease or classical motor neuron disease, is a rapidly progressive, invariably fatal neurological disease that attacks the neurons responsible for controlling voluntary muscles. In ALS, both the upper motor neurons and the lower motor neurons degenerate or die, ceasing to send messages to muscles. Unable to function, the muscles gradually atrophy. Symptoms are usually first noticed in the arms and hands, legs, or swallowing muscles. Muscle weakness and atrophy occur on both sides of the body. Individuals with ALS lose their strength and the ability to move their arms and legs, and to hold the body upright. The disease does not affect a person's ability to see, smell, taste, hear, or recognize touch. Although the disease does not usually impair a person's mind or personality, several recent studies suggest that some people with ALS may develop cognitive problems involving word fluency, decision-making, and memory. The cause of ALS is not known. No cure has yet been found for ALS. The drug riluzole prolongs life by 2-3 months but does not relieve symptoms.

[0264] Multiple Sclerosis. Multiple sclerosis (MS) is a neurologic disease that can range from benign to completely disabling. MS results from an auto-immune response to nerve-insulating myelin. Such assaults may be linked to an unknown environmental trigger, perhaps a virus.

[0265] Most people experience their first symptoms of MS between the ages of 20 and 40; the initial symptom of MS is often blurred or double vision, red-green color distortion, or even blindness in one eye. Most MS patients experience muscle weakness in their extremities and difficulty with coordination and balance. These symptoms may be severe enough to impair walking or even standing. In the worst cases, MS can produce partial or complete paralysis. Most people with MS also exhibit paresthesias, transitory abnormal sensory feelings such as numbness, prickling, or “pins and needles” sensations. Some may also experience pain. Speech impediments, tremors, and dizziness are other frequent complaints. Occasionally, people with MS have hearing loss. Approximately half of all people with MS experience cognitive impairments such as difficulties with concentration, attention, memory, and poor judgment, but such symptoms are usually mild and are frequently overlooked. Depression is another common feature of MS. There is as yet no cure for MS. Three forms of beta interferon (Avonex, Betaseron, and Rebif) have now been approved by the Food and Drug Administration for treatment of relapsing-remitting MS. Beta interferon has been shown to reduce the number of exacerbations and may slow the progression of physical disability. When attacks do occur, they tend to be shorter and less severe. The FDA also has approved a synthetic form of myelin basic protein, called copolymer I (Copaxone), for the treatment of relapsing-remitting MS. An immunosuppressant treatment, Novantrone (mitoxantrone), is approved by the FDA for the treatment of advanced or chronic MS. The FDA has also approved dalfampridine (Ampyra) to improve walking in individuals with MS. While steroids do not affect the course of MS over time, they can reduce the duration and severity of attacks in some patients. Spasticity, which can occur either as a sustained stiffness caused by increased muscle tone or as spasms that come and go, is usually treated with muscle relaxants and tranquilizers such as baclofen, tizanidine, diazepam, clonazepam, and dantrolene. Other drugs that may reduce fatigue in some, but not all, patients include amantadine (Symmetrel), pemoline (Cylert), and the still-experimental drug aminopyridine. Although improvement of optic symptoms usually occurs even without treatment, a short course of treatment with intravenous methylprednisolone (Solu-Medrol) followed by treatment with oral steroids is sometimes used.

[0266] Alzheimer's Disease. Alzheimer's disease is an irreversible, progressive brain disease that slowly destroys memory and thinking skills. In most people with Alzheimer's, symptoms first appear after age 60. Estimates vary, but as many as 5.1 million Americans may have Alzheimer's disease. Patient's exhibit various brain abnormalities including amyloid plaques, neurofibrillary tangles, and neuronal loss. Four medications are approved by the U.S. Food and Drug Administration to treat Alzheimer's. Donepezil, rivastigmine and galantamine are used to treat mild to moderate Alzheimer's. Memantine is used to treat moderate to severe Alzheimer's. These drugs do not change the underlying disease process, are effective for some but not all people, and may help only for a limited time.

[0267] Schizophrenia. Schizophrenics display three broad categories of symptoms characterized as positive, negative and cognitive. Positive symptoms are psychotic behaviors including hallucinations, delusions, thought and movement disorders. Negative symptoms are associated with disruptions to normal behaviors. These symptoms include flat affect, lack of pleasure in everyday activities, lack of ability to begin and sustain planned activities, and speaking little, even when forced to interact as well as having neglect for basic personal hygiene. Cognitive symptoms include poor ability to understand information and use it to make decisions, trouble focusing or paying attention and problems with the ability to use information immediately after learning it. This neurologic disorder effects 1 percent of the general population, but it occurs in 10 percent of people who have a first-degree relative with the disorder. The risk is highest for an identical twin of a person with schizophrenia with a 40-65 percent chance of developing the disorder. No gene causes the disease by itself. Aberrant dopamine and glutamate transmission is believed to play a role in schizophrenia. Treatments include antipsychotic medications and various psychosocial treatments. Older antipsychotic medications include Chlorpromazine, Haloperidol, Perphenazine, Etrafon and Fluphenazine. New antipsychotic medications include clozapine which can cause agranulocytosis, requiring bi-weekly WBC count evaluation. Other atypical antipsychotics include Risperidone, Olanzapine, Quetiapine, Ziprasidone, Aripiprazole and Paliperidone. Side effects of many antipsychotics include drowsiness, dizziness when changing positions, blurred vision, rapid heartbeat, sensitivity to the sun, Skin rashes and menstrual problems for women. Atypical antipsychotic medications can cause major weight gain and changes in a person's metabolism. This may increase a person's risk of getting diabetes and high cholesterol. Typical antipsychotic medications can cause side effects related to physical movement, such as rigidity, persistent muscle spasms, tremors and restlessness. Long-term use of typical antipsychotic medications may lead to a condition called tardive dyskinesia (TD). TD causes uncontrolled, and in some cases permanent, involuntary muscle movements.

### Additional Description of the Invention

[0268] The present invention relates to methods and compositions for the treatment of any gene that is desirable to modulate expression of. This includes but is not limited to cancers. In the next sections will will describe both cancer and non-cancer targets and then in the section immediately following those selected cancer and non-cancer targets we will present over 40 High Value Targets, both cancer and noncancer, with sequence information, and some of these examples will have data with detailed information about our techniques and methods as well as our surprising results.

[0269] Cancer Targets

[0270] In some embodiments, the present invention provides oligonucleotide-based therapeutics for the inhibition of oncogenes involved in a variety of cancers. The present invention is not limited to the treatment of cancer or any particular cancer. Any cancer can be targeted, including, but not limited to, breast cancers. The present invention is also not limited to the targeting of cancers or oncogenes. The methods and compositions of the present invention are suitable for use with any gene that it is desirable to inhibit the expression of (e.g., for therapeutic or research uses. Specific gene targets that have been optimally identified as susceptible to the DNAi therapeutic approach are described below.

[0271] Oncogene Targets such as,

[0272] In some embodiments, the present invention provides DNAi inhibitors of oncogenes. The present invention is not limited to the inhibition of a particular oncogene. Indeed, the present invention encompasses DNAi inhibitors to any number of oncogenes including, but not limited to, those disclosed herein.

[0273] Combination Therapies with Cancer Targets

[0274] In some embodiments, the compositions of the present invention are provided in combination with existing therapies. In other embodiments, two or more compounds of the present invention are provided in combination. In some embodiments, the compounds of the present invention are provided in combination with known cancer chemotherapy agents. The present invention is not limited to a particular chemotherapy agent.

[0275] Various classes of antineoplastic (e.g., anticancer) agents are contemplated for use in certain embodiments of the present invention. Anticancer agents suitable for use with the present invention include, but are not limited to, agents that induce apoptosis, agents that inhibit adenosine deaminase function, inhibit pyrimidine biosynthesis, inhibit purine ring biosynthesis, inhibit nucleotide interconversions, inhibit ribonucleotide reductase, inhibit thymidine monophosphate (TMP) synthesis, inhibit dihydrofolate reduction, inhibit DNA synthesis, form adducts with DNA, damage DNA, inhibit DNA repair, intercalate with DNA, deaminate asparagines, inhibit RNA synthesis, inhibit protein synthesis or stability, inhibit microtubule synthesis or function, and the like.

[0276] In some embodiments, exemplary anticancer agents suitable for use in compositions and methods of the present invention include, but are not limited to: 1) alkaloids, including microtubule inhibitors (e.g., vincristine, vinblastine, and vindesine, etc.), microtubule stabilizers (e.g., paclitaxel (TAXOL), and docetaxel, etc.), and chromatin function inhibitors, including topoisomerase inhibitors, such as epipodophyllotoxins (e.g., etoposide (VP-16), and teniposide (VM-26), etc.), and agents that target topoisomerase I (e.g., camptothecin and isirinotecan (CPT-11), etc.); 2) covalent DNA-binding agents (alkylating agents), including nitrogen mustards (e.g., mechlorethamine, chlorambucil, cyclophosphamide, ifosphamide, and busulfan (MYLERAN), etc.), nitrosoureas (e.g., carmustine, lomustine, and semustine, etc.), and other alkylating agents (e.g., dacarbazine, hydroxymethylmelamine, thiotepa, and mitomycin, etc.); 3) noncovalent DNA-binding agents (antitumor antibiotics), including nucleic acid inhibitors (e.g., dactinomycin (actinomycin D), etc.), anthracyclines (e.g., daunorubicin (daunomycin, and cerubidine), doxorubicin (adriamycin), and idarubicin (idamycin), etc.), anthracenediones (e.g., anthracycline analogues, such as mitoxantrone, etc.), bleomycins (BLENOXANE), etc., and plicamycin (mithramycin), etc.; 4) antimetabolites, including antifolates (e.g., methotrexate, FOLEX, and MEXATE, etc.), purine antimetabolites (e.g., 6-mercaptopurine (6-MP, PURINETHOL), 6-thioguanine (6-TG), azathioprine, acyclovir, ganciclovir, chlorodeoxyadenosine, 2-chlorodeoxyadenosine (CdA), and 2′-deoxycoformycin (pentostatin), etc.), pyrimidine antagonists (e.g., fluoropyrimidines (e.g., 5-fluorouracil (ADRUCIL), 5-fluorodeoxyuridine (FdUrd) (floxuridine)) etc.), and cytosine arabinosides (e.g., CYTOSAR (ara-C) and fludarabine, etc.); 5) enzymes, including L-asparaginase, and hydroxyurea, etc.; 6) hormones, including glucocorticoids, antiestrogens (e.g., tamoxifen, etc.), nonsteroidal antiandrogens (e.g., flutamide, etc.), and aromatase inhibitors (e.g., anastrozole (ARIMIDEX), etc.); 7) platinum compounds (e.g., cisplatin and carboplatin, etc.); 8) monoclonal antibodies conjugated with anticancer drugs, toxins, and/or radionuclides, etc.; 9) biological response modifiers (e.g., interferons (e.g., IFN-α, etc.) and interleukins (e.g., IL-2, etc.), etc.); 10) adoptive immunotherapy; 11) hematopoietic growth factors; 12) agents that induce tumor cell differentiation (e.g., all-trans-retinoic acid, etc.); 13) gene therapy techniques; 14) antisense therapy techniques; 15) tumor vaccines; 16) therapies directed against tumor metastases (e.g., batimastat, etc.); 17) angiogenesis inhibitors; 18) proteosome inhibitors (e.g., VELCADE); 19) inhibitors of acetylation and/or methylation (e.g., HDAC inhibitors); 20) modulators of NF kappa B; 21) inhibitors of cell cycle regulation (e.g., CDK inhibitors); 22) modulators of p53 protein function; and 23) radiation.

[0277] Any oncolytic agent that is routinely used in a cancer therapy context finds use in the compositions and methods of the present invention. For example, the U.S. Food and Drug Administration maintains a formulary of oncolytic agents approved for use in the United States. International counterpart agencies to the U.S.F.D.A. maintain similar formularies. Table 1 provides a list of exemplary antineoplastic agents approved for use in the U.S. Those skilled in the art will appreciate that the “product labels” required on all U.S. approved chemotherapeutics describe approved indications, dosing information, toxicity data, and the like, for the exemplary agents.

TABLE 1

| | | |
|---|---|---|
| Aldesleukin | Proleukin | Chiron Corp., |
| (des-alanyl-1, serine-125 human interleukin-2) | | Emeryville, CA |
| Alemtuzumab | Campath | Millennium and |
| (IgG1κ anti CD52 antibody) | | ILEX Partners, LP, |
| | | Cambridge, MA |
| Alitretinoin | Panretin | Ligand |
| (9-cis-retinoic acid) | | Pharmaceuticals, |
| | | Inc., San Diego CA |
| Allopurinol | Zyloprim | GlaxoSmithKline, |
| (1,5-dihydro-4H-pyrazolo[3,4-d]pyrimidin-4-one | | Research Triangle |
| monosodium salt) | | Park, NC |
| Altretamine | Hexalen | US Bioscience, |
| (N,N,N′,N′,N″,N″,-hexamethyl-1,3,5-triazine-2,4,6- | | West |
| triamine) | | Conshohocken, PA |
| Amifostine | Ethyol | US Bioscience |
| (ethanethiol, 2-[(3-aminopropyl)amino]-, dihydrogen | | |
| phosphate (ester)) | | |
| Anastrozole | Arimidex | AstraZeneca |
| (1,3-Benzenediacetonitrile,a,a,a′,a′-tetramethyl-5- | | Pharmaceuticals, |
| (1H-1,2,4-triazol-1-ylmethyl)) | | LP, Wilmington, |
| | | DE |
| Arsenic trioxide | Trisenox | Cell Therapeutic, |
| | | Inc., Seattle, WA |
| Asparaginase | Elspar | Merck & Co., Inc., |
| (L-asparagine amidohydrolase, type EC-2) | | Whitehouse |
| | | Station, NJ |
| BCG Live | TICE BCG | Organon Teknika, |
| (lyophilized preparation of an attenuated strain of | | Corp., Durham, NC |
| Mycobacterium bovis (Bacillus Calmette-Gukin | | |
| [BCG], substrain Montreal) | | |
| bexarotene capsules | Targretin | Ligand |
| (4-[1-(5,6,7,8-tetrahydro-3,5,5,8,8-pentamethyl-2- | | Pharmaceuticals |
| napthalenyl) ethenyl] benzoic acid) | | |
| Bexarotene gel | Targretin | Ligand |
| | | Pharmaceuticals |
| Bleomycin | Blenoxane | Bristol-Myers |
| (cytotoxic glycopeptide antibiotics produced by | | Squibb Co., NY, |
| Streptomyces verticillus; bleomycin A2 and | | NY |
| bleomycin B2) | | |
| Capecitabine | Xeloda | Roche |
| (5′-deoxy-5-fluoro-N-[(pentyloxy)carbonyl]-cytidine) | | |
| Carboplatin | Paraplatin | Bristol-Myers |
| (platinum, diammine [1,1- | | Squibb |
| cyclobutanedicarboxylato(2-)-0,0′]-,(SP-4-2)) | | |
| Carmustine | BCNU, | Bristol-Myers |
| (1,3-bis(2-chloroethyl)-1-nitrosourea) | BiCNU | Squibb |
| Carmustine with Polifeprosan 20 Implant | Gliadel | Guilford |
| | Wafer | Pharmaceuticals, |
| | | Inc., Baltimore, |
| | | MD |
| Celecoxib | Celebrex | Searle |
| (as 4-[5-(4-methylphenyl)-3-(trifluoromethyl)-1H- | | Pharmaceuticals, |
| pyrazol-1-yl] benzenesulfonamide) | | England |
| Chlorambucil | Leukeran | GlaxoSmithKline |
| (4-[bis(2chlorethyl)amino]benzenebutanoic acid) | | |
| Cisplatin | Platinol | Bristol-Myers |
| (PtC12H6N2) | | Squibb |
| Cladribine | Leustatin, 2- | R. W. Johnson |
| (2-chloro-2′-deoxy-b-D-adenosine) | CdA | Pharmaceutical |
| | | Research Institute, |
| | | NJ |
| Cyclophosphamide | Cytoxan, | Bristol-Myers |
| (2-[bis(2-chloroethyl)amino] tetrahydro-2H-13,2- | Neosar | Squibb |
| oxazaphosphorine 2-oxide monohydrate) | | |
| Cytarabine | Cytosar-U | Pharmacia & |
| (1-b-D-Arabinofuranosylcytosine, C9H13N3O5) | | Upjohn Company |
| Cytarabine liposomal | DepoCyt | Skye |
| | | Pharmaceuticals, |
| | | Inc., San Diego, |
| | | CA |
| Dacarbazine | DTIC-Dome | Bayer AG, |
| (5-(3,3-dimethyl-1-triazeno)-imidazole-4- | | Leverkusen, |
| carboxamide (DTIC)) | | Germany |
| Dactinomycin, actinomycin D | Cosmegen | Merck |
| (actinomycin produced by Streptomyces parvullus, | | |
| C62H86N12O16) | | |
| Darbepoetin alfa | Aranesp | Amgen, Inc., |
| (recombinant peptide) | | Thousand Oaks, |
| | | CA |
| daunorubicin liposomal | DanuoXome | Nexstar |
| ((8S-cis)-8-acetyl-10-[(3-amino-2,3,6-trideoxy-á-L- | | Pharmaceuticals, |
| lyxo-hexopyranosyl)oxy]-7,8,9,10-tetrahydro-6,8,11- | | Inc., Boulder, CO |
| trihydroxy-1-methoxy-5,12-naphthacenedione | | |
| hydrochloride) | | |
| Daunorubicin HCl, daunomycin | Cerubidine | Wyeth Ayerst, |
| ((1S,3S)-3-Acetyl-1,2,3,4,6,11-hexahydro-3,5,12- | | Madison, NJ |
| trihydroxy-10-methoxy-6,11-dioxo-1-naphthacenyl | | |
| 3-amino-2,3,6-trideoxy-(alpha)-L-lyxo- | | |
| hexopyranoside hydrochloride) | | |
| Denileukin diftitox | Ontak | Seragen, Inc., |
| (recombinant peptide) | | Hopkinton, MA |
| Dexrazoxane | Zinecard | Pharmacia & |
| ((S)-4,4′-(1-methyl-1,2-ethanediyl)bis-2,6- | | Upjohn Company |
| piperazinedione) | | |
| Docetaxel | Taxotere | Aventis |
| ((2R,3S)-N-carboxy-3-phenylisoserine, N-tert-butyl | | Pharmaceuticals, |
| ester, 13-ester with 5b-20-epoxy-12a,4,7b,10b,13a- | | Inc., Bridgewater, |
| hexahydroxytax-11-en-9-one 4-acetate 2-benzoate, | | NJ |
| trihydrate) | | |
| Doxorubicin HCl | Adriamycin, | Pharmacia & |
| (8S,10S)-10-[(3-amino-2,3,6-trideoxy-a-L-lyxo- | Rubex | Upjohn Company |
| hexopyranosyl)oxy]-8-glycolyl-7,8,9,10-tetrahydro- | | |
| 6,8,11-trihydroxy-1-methoxy-5,12- | | |
| naphthacenedione hydrochloride) | | |
| doxorubicin | Adriamycin | Pharmacia & |
| | PFS | Upjohn Company |
| | Intravenous | |
| | injection | |
| doxorubicin liposomal | Doxil | Sequus |
| | | Pharmaceuticals, |
| | | Inc., Menlo park, |
| | | CA |
| dromostanolone propionate | Dromostanolone | Eli Lilly & |
| (17b-Hydroxy-2a-methyl-5a-androstan-3-one | | Company, |
| propionate) | | Indianapolis, IN |
| dromostanolone propionate | Masterone | Syntex, Corp., Palo |
| | injection | Alto, CA |
| Elliott′s B Solution | Elliott′s B | Orphan Medical, |
| | Solution | Inc |
| Epirubicin | Ellence | Pharmacia & |
| ((8S-cis)-10-[(3-amino-2,3,6-trideoxy-a-L-arabino- | | Upjohn Company |
| hexopyranosyl)oxy]-7,8,9,10-tetrahydro-6,8,11- | | |
| trihydroxy-8-(hydroxyacetyl)-1-methoxy-5,12- | | |
| naphthacenedione hydrochloride) | | |
| Epoetin alfa | Epogen | Amgen, Inc |
| (recombinant peptide) | | |
| Estramustine | Emcyt | Pharmacia & |
| (estra-1,3,5(10)-triene-3,17-diol(17(beta))-, 3-[bis(2- | | Upjohn Company |
| chloroethyl)carbamate] 17-(dihydrogen phosphate), | | |
| disodium salt, monohydrate, or estradiol 3-[bis(2- | | |
| chloroethyl)carbamate] 17-(dihydrogen phosphate), | | |
| disodium salt, monohydrate) | | |
| Etoposide phosphate | Etopophos | Bristol-Myers |
| (4′-Demethylepipodophyllotoxin9-[4,6-O-(R)- | | Squibb |
| ethylidene-(beta)-D-glucopyranoside], 4′- | | |
| (dihydrogen phosphate)) | | |
| etoposide, VP-16 | Vepesid | Bristol-Myers |
| (4′-demethylepipodophyllotoxin 9-[4,6-0-(R)- | | Squibb |
| ethylidene-(beta)-D-glucopyranoside]) | | |
| Exemestane | Aromasin | Pharmacia & |
| (6-methylenandrosta-1,4-diene-3,17-dione) | | Upjohn Company |
| Filgrastim | Neupogen | Amgen, Inc |
| (r-metHuG-CSF) | | |
| floxuridine (intraarterial) | FUDR | Roche |
| (2′-deoxy-5-fluorouridine) | | |
| Fludarabine | Fludara | Berlex |
| (fluorinated nucleotide analog of the antiviral agent | | Laboratories, Inc., |
| vidarabine, 9-b-D-arabinofuranosyladenine (ara-A)) | | Cedar Knolls, NJ |
| Fluorouracil, 5-FU | Adrucil | ICN |
| (5-fluoro-2,4(1H,3H)-pyrimidinedione) | | Pharmaceuticals, |
| | | Inc., Humacao, |
| | | Puerto Rico |
| Fulvestrant | Faslodex | IPR |
| (7-alpha-[9-(4,4,5,5,5-penta fluoropentylsulphinyl) | | Pharmaceuticals, |
| nonyl]estra-1,3,5-(10)-triene-3,17-beta-diol) | | Guayama, Puerto |
| | | Rico |
| Gemcitabine | Gemzar | Eli Lilly |
| (2′-deoxy-2′,2′-difluorocytidine monohydrochloride | | |
| (b-isomer)) | | |
| Gemtuzumab Ozogamicin | Mylotarg | Wyeth Ayerst |
| (anti-CD33 hP67.6) | | |
| Goserelin acetate | Zoladex | AstraZeneca |
| (acetate salt of [D-Ser(But)6,Azgly10]LHRH; pyro- | Implant | Pharmaceuticals |
| Glu-His-Trp-Ser-Tyr-D-Ser(But)-Leu-Arg-Pro- | | |
| Azgly-NH2 acetate [C59H84N18O14•(C2H4O2)x | | |
| Hydroxyurea | Hydrea | Bristol-Myers |
| | | Squibb |
| Ibritumomab Tiuxetan | Zevalin | Biogen IDEC, Inc., |
| (immunoconjugate resulting from a thiourea covalent | | Cambridge MA |
| bond between the monoclonal antibody Ibritumomab | | |
| and the linker-chelator tiuxetan [N-[2- | | |
| bis(carboxymethyl)amino]-3-(p- | | |
| isothiocyanatophenyl)-propyl]-[N-[2- | | |
| bis(carboxymethyl)amino]-2-(methyl)- | | |
| ethyl]glycine) | | |
| Idarubicin | Idamycin | Pharmacia & |
| (5,12-Naphthacenedione, 9-acetyl-7-[(3-amino- | | Upjohn Company |
| 2,3,6-trideoxy-(alpha)-L-lyxo-hexopyranosyl)oxy]- | | |
| 7,8,9,10-tetrahydro-6,9,11-trihydroxyhydrochloride, | | |
| (7S-cis)) | | |
| Ifosfamide | IFEX | Bristol-Myers |
| (3-(2-chloroethyl)-2-[(2- | | Squibb |
| chloroethyl)amino]tetrahydro-2H-1,3,2- | | |
| oxazaphosphorine 2-oxide) | | |
| Imatinib Mesilate | Gleevec | Novartis AG, |
| (4-[(4-Methyl-1-piperazinyl)methyl]-N-[4-methyl-3- | | Basel, Switzerland |
| [[4-(3 -pyridinyl)-2-pyrimidinyl] amino]- | | |
| phenyl]benzamide methanesulfonate) | | |
| Interferon alfa-2a | Roferon-A | Hoffmann-La |
| (recombinant peptide) | | Roche, Inc., Nutley, |
| | | NJ |
| Interferon alfa-2b | Intron A | Schering AG, |
| (recombinant peptide) | (Lyophilized | Berlin, Germany |
| | Betaseron) | |
| Irinotecan HCl | Camptosar | Pharmacia & |
| ((4S)-4,11-diethyl-4-hydroxy-9-[(4-piperi- | | Upjohn Company |
| dinopiperidino)carbonyloxy]-1H-pyrano[3′,4′:6,7] | | |
| indolizino[1,2-b] quinoline-3,14(4H,12H) dione | | |
| hydrochloride trihydrate) | | |
| Letrozole | Femara | Novartis |
| (4,4′-(1H-1,2,4-Triazol-1-ylmethylene) | | |
| dibenzonitrile) | | |
| Leucovorin | Wellcovorin, | Immunex, Corp., |
| (L-Glutamic acid, N[4[[(2amino-5-formyl-1,4,5,6,7,8 | Leucovorin | Seattle, WA |
| hexahydro4oxo6-pteridinyl)methyl] amino]benzoyl] , | | |
| calcium salt (1:1)) | | |
| Levamisole HCl | Ergamisol | Janssen Research |
| ((−)-(S)-2,3,5,6-tetrahydro-6-phenylimidazo [2,1-b] | | Foundation, |
| thiazole monohydrochloride C11H12N2S•HCl) | | Titusville, NJ |
| Lomustine | CeeNU | Bristol-Myers |
| (1-(2-chloro-ethyl)-3-cyclohexyl-1-nitrosourea) | | Squibb |
| Meclorethamine, nitrogen mustard | Mustargen | Merck |
| (2-chloro-N-(2-chloroethyl)-N-methylethanamine | | |
| hydrochloride) | | |
| Megestrol acetate | Megace | Bristol-Myers |
| 17α(acetyloxy)-6-methylpregna-4,6-diene-3,20- | | Squibb |
| dione | | |
| Melphalan, L-PAM | Alkeran | GlaxoSmithKline |
| (4-[bis(2-chloroethyl) amino]-L-phenylalanine) | | |
| Mercaptopurine, 6-MP | Purinethol | GlaxoSmithKline |
| (1,7-dihydro-6H-purine-6-thione monohydrate) | | |
| Mesna | Mesnex | Asta Medica |
| (sodium 2-mercaptoethane sulfonate) | | |
| Methotrexate | Methotrexate | Lederle |
| (N-[4-[[(2,4-diamino-6- | | Laboratories |
| pteridinyl)methyl]methylamino]benzoyl]-L-glutamic | | |
| acid) | | |
| Methoxsalen (9-methoxy-7H-furo[3,2-g][1]- | Uvadex | Therakos, Inc., |
| benzopyran-7-one) | | Way Exton, Pa |
| Mitomycin C | Mutamycin | Bristol-Myers |
| | | Squibb |
| Mitomycin C | Mitozytrex | SuperGen, Inc., |
| | | Dublin, CA |
| Mitotane | Lysodren | Bristol-Myers |
| (1,1-dichloro-2-(o-chlorophenyl)-2-(p-chlorophenyl) | | Squibb |
| ethane) | | |
| Mitoxantrone | Novantrone | Immunex |
| (1,4-dihydroxy-5,8-bis[[2-[(2- | | Corporation |
| hydroxyethyl)amino]ethyl]amino]-9,10- | | |
| anthracenedione dihydrochloride) | | |
| Nandrolone phenpropionate | Durabolin-50 | Organon, Inc., West |
| | | Orange, NJ |
| Nofetumomab | Verluma | Boehringer |
| | | Ingelheim Pharma |
| | | KG, Germany |
| Oprelvekin | Neumega | Genetics Institute, |
| (IL-11) | | Inc., Alexandria, |
| | | VA |
| Oxaliplatin | Eloxatin | Sanofi Synthelabo, |
| (cis-[(1R,2R)-1,2-cyclohexanediamine-N,N′] | | Inc., NY, NY |
| [oxalato(2-)-O,O′] platinum) | | |
| Paclitaxel | TAXOL | Bristol-Myers |
| (5β,20-Epoxy-1,2a,4,7β,10β,13a-hexahydroxytax- | | Squibb |
| 11-en-9-one 4,10-diacetate 2-benzoate 13-ester with | | |
| (2R,3S)-N-benzoyl-3-phenylisoserine) | | |
| Pamidronate | Aredia | Novartis |
| (phosphonic acid (3-amino-1-hydroxypropylidene) | | |
| bis-, disodium salt, pentahydrate, (APD)) | | |
| Pegademase | Adagen | Enzon |
| ((monomethoxypolyethylene glycol succinimidyl) 11- | (Pegademase | Pharmaceuticals, |
| 17-adenosine deaminase) | Bovine) | Inc., Bridgewater, |
| | | NJ |
| Pegaspargase | Oncaspar | Enzon |
| (monomethoxypolyethylene glycol succinimidyl L- | | |
| asparaginase) | | |
| Pegfilgrastim | Neulasta | Amgen, Inc |
| (covalent conjugate of recombinant methionyl human | | |
| G-CSF (Filgrastim) and monomethoxypolyethylene | | |
| glycol) | | |
| Pentostatin | Nipent | Parke-Davis |
| | | Pharmaceutical Co., |
| | | Rockville, MD |
| Pipobroman | Vercyte | Abbott |
| | | Laboratories, |
| | | Abbott Park, IL |
| Plicamycin, Mithramycin | Mithracin | Pfizer, Inc., NY, |
| (antibiotic produced by Streptomyces plicatus) | | NY |
| Porfimer sodium | Photofrin | QLT |
| | | Phototherapeutics, |
| | | Inc., Vancouver, |
| | | Canada |
| Procarbazine | Matulane | Sigma Tau |
| (N-isopropyl-μ-(2-methylhydrazino)-p-toluamide | | Pharmaceuticals, |
| monohydrochloride) | | Inc., Gaithersburg, |
| | | MD |
| Quinacrine | Atabrine | Abbott Labs |
| (6-chloro-9-(1-methyl-4-diethyl-amine) | | |
| butylamino-2-methoxyacridine) | | |
| Rasburicase | Elitek | Sanofi-Synthelabo, |
| (recombinant peptide) | | Inc., |
| Rituximab | Rituxan | Genentech, Inc., |
| (recombinant anti-CD20 antibody) | | South San |
| | | Francisco, CA |
| Sargramostim | Prokine | Immunex Corp |
| (recombinant peptide) | | |
| Streptozocin | Zanosar | Pharmacia & |
| (streptozocin 2-deoxy-2- | | Upjohn Company |
| [[(methylnitrosoamino)carbonyl]amino]-a(and b)- | | |
| D-glucopyranose and 220 mg citric acid anhydrous) | | |
| Talc | Sclerosol | Bryan, Corp., |
| (Mg3Si4O10 (OH)2) | | Woburn, MA |
| Tamoxifen | Nolvadex | AstraZeneca |
| ((Z)2-[4-(1,2-diphenyl-1-butenyl) phenoxy]-N,N- | | Pharmaceuticals |
| dimethylethanamine 2-hydroxy-1,2,3- | | |
| propanetricarboxylate (1:1)) | | |
| Temozolomide | Temodar | Schering |
| (3,4-dihydro-3-methyl-4-oxoimidazo[5,1-d]-as- | | |
| tetrazine-8-carboxamide) | | |
| Teniposide, VM-26 | Vumon | Bristol-Myers |
| (4′-demethylepipodophyllotoxin 9-[4,6-0-(R)-2- | | Squibb |
| thenylidene-(beta)-D-glucopyranoside]) | | |
| Testolactone | Teslac | Bristol-Myers |
| (13-hydroxy-3-oxo-13,17-secoandrosta-1,4-dien-17- | | Squibb |
| oic acid [dgr]-lactone) | | |
| Thioguanine, 6-TG | Thioguanine | GlaxoSmithKline |
| (2-amino-1,7-dihydro-6H-purine-6-thione) | | |
| Thiotepa | Thioplex | Immunex |
| (Aziridine,1,1′,1″-phosphinothioylidynetris-, or Tris | | Corporation |
| (1-aziridinyl) phosphine sulfide) | | |
| Topotecan HCl | Hycamtin | GlaxoSmithKline |
| ((S)-10-[(dimethylamino)methyl]-4-ethyl-4,9- | | |
| dihydroxy-1H-pyrano[3′,4′:6,7] indolizino [1,2-b] | | |
| quinoline-3,14-(4H,12H)-dione monohydrochloride) | | |
| Toremifene | Fareston | Roberts |
| (2-(p-[(Z)-4-chloro-1,2-diphenyl-1-butenyl]- | | Pharmaceutical |
| phenoxy)-N,N-dimethylethylamine citrate (1:1)) | | Corp., Eatontown, |
| | | NJ |
| Tositumomab, I 131 Tositumomab | Bexxar | Corixa Corp., |
| (recombinant murine immunotherapeutic monoclonal | | Seattle, WA |
| IgG2a lambda anti-CD20 antibody (I 131 is a | | |
| radioimmunotherapeutic antibody)) | | |
| Trastuzumab | Herceptin | Genentech, Inc |
| (recombinant monoclonal IgG1 kappa anti-HER2 | | |
| antibody) | | |
| Tretinoin, ATRA | Vesanoid | Roche |
| (all-trans retinoic acid) | | |
| Uracil Mustard | Uracil | Roberts Labs |
| | Mustard | |
| | Capsules | |
| Valrubicin, N-trifluoroacetyladriamycin-14- | Valstar | Anthra --> Medeva |
| valerate | | |
| ((2S-cis)-2-[1,2,3,4,6,11-hexahydro-2,5,12- | | |
| trihydroxy-7 methoxy-6,11-dioxo-[[4 2,3,6-trideoxy- | | |
| 3-[(trifluoroacetyl)-amino-α-L-lyxo- | | |
| hexopyranosyl]oxyl]-2-naphthacenyl]-2-oxoethyl | | |
| pentanoate) | | |
| Vinblastine, Leurocristine | Velban | Eli Lilly |
| (C46H56N4O10•H2SO4) | | |
| Vincristine | Oncovin | Eli Lilly |
| (C46H56N4O10•H2SO4) | | |
| Vinorelbine | Navelbine | GlaxoSmithKline |
| (3′,4′-didehydro-4′-deoxy-C′-norvincaleukoblastine | | |
| [R-(R*,R*)-2,3-dihydroxybutanedioate (1:2)(salt)]) | | |
| Zoledronate, Zoledronic acid | Zometa | Novartis |
| ((1-Hydroxy-2-imidazol-1-yl-phosphonoethyl) | | |
| phosphonic acid monohydrate) | | |

[0278] Other identified cancer combination therapies include the following: PI3K inhibitors (CAL101), Bruton Kinase inhibitor (PCI-32765), and BCL-6 inhibitor. This document describes the targets and associated therapy for these identified cancers as being particularly susceptible to treatment with combination therapies. Targets

[0279] The present invention is not limited to the cancer and non-cancer targets listed above commonly found in humans. The present invention can also be applied both to other cancer targets (also referred to as oncogenes) (and where such cancer targets may also be involved in other disease such as inflammation, neurological, metabolic, cardiovascular, etc.) and to non-cancer target such as Cardiovascular/Metabolic Disease, Eye Disease, Infectious Disease, Inflammation, Neurological Disease, Rare Disease, and Stem Cells. Examples of specific genes are included in Table 2, but are not limited to those described in Table. Additional targets are not listed but can be found in the key proliferation pathways such as MAPK, PI3K, MEK, etc. The present invention can also apply to disease and growth targets for plant genome and animal genomes.

TABLE 2
Cancer and non-cancer targets
DNAi Disease, Gene, and Cell System Targets

| ID | Disease Area | Target |
|---|---|---|
| 1 | Cancer | 2-dG |
| 2 | Cancer | 4-1BB |
| 3 | Cancer | ABCB1 |
| 4 | Cancer | ABL |
| 5 | Cancer | ABL1/BCR |
| 6 | Cancer | Act-1 |
| 7 | Cancer | ADAM12 |
| 8 | Cancer | ADAM7 |
| 9 | Cancer | ADAMTS4 |
| 10 | Cancer | ADAMTS5 |
| 11 | Cancer | AFP (Alpha-fetoprotein) |
| 12 | Cancer | AKT |
| 13 | Cancer | AKT1 |
| 14 | Cancer | AKT2 |
| 15 | Cancer | AKT3 |
| 16 | Cancer | AldoA |
| 17 | Cancer | ALK |
| 18 | Cancer | ALK/NPM1 |
| 19 | Cancer | AMI1 |
| 20 | Cancer | AML1/ETO |
| 21 | Cancer | Androgen Receptor (AR) |
| 22 | Cancer | Angiopoeitin (ANG) |
| 23 | Cancer | ANGPT2 (ANG-2) |
| 24 | Cancer | APC |
| 25 | Cancer | ARAF |
| 26 | Cancer | AR |
| 27 | Cancer | AREG |
| 28 | Cancer | ARF6 |
| 29 | Cancer | ARNT |
| 30 | Cancer | Aromatase Inhibitors (Ais) |
| 31 | Cancer | ASXL1 |
| 32 | Cancer | ATM |
| 33 | Cancer | ATRX |
| 34 | Cancer | AXIN1 |
| 35 | Cancer | AXL |
| 36 | Cancer | B7H3 |
| 37 | Cancer | BAX |
| 38 | Cancer | BBC3 |
| 39 | Cancer | BCBL |
| 40 | Cancer | BCL1 |
| 41 | Cancer | BCL2 |
| 42 | Cancer | BCL2L1 (BCLXL) |
| 43 | Cancer | BCL2L 11 |
| 44 | Cancer | BCL3 |
| 45 | Cancer | BCL6 |
| 46 | Cancer | BCR/ABL |
| 47 | Cancer | BDNF |
| 48 | Cancer | Beclin-1 |
| 49 | Cancer | Beta catenin |
| 50 | Cancer | BIRC2 (c-IAP1) |
| 51 | Cancer | BIRC3 (c-IAP2) |
| 52 | Cancer | BIRC4 |
| 53 | Cancer | BIRC5 |
| 54 | Cancer | BMI1 |
| 55 | Cancer | BMP10 |
| 56 | Cancer | BRAF |
| 57 | Cancer | BRCA1 |
| 58 | Cancer | BRCA2 |
| 59 | Cancer | BRD3 |
| 60 | Cancer | BTK |
| 61 | Cancer | BTLA |
| 62 | Cancer | C/EBPalpha |
| 63 | Cancer | C5B-9 |
| 64 | Cancer | CANT1 |
| 65 | Cancer | CASP2 |
| 66 | Cancer | CASP3 |
| 67 | Cancer | CASP8 |
| 68 | Cancer | CBFA2T3 |
| 69 | Cancer | CBFB |
| 70 | Cancer | CBL |
| 71 | Cancer | CBLB |
| 72 | Cancer | CBLC |
| 73 | Cancer | CCND1 |
| 74 | Cancer | CCND3 |
| 75 | Cancer | CCKBR |
| 76 | Cancer | CCNA1 |
| 77 | Cancer | CCNB1 |
| 78 | Cancer | CD133 |
| 79 | Cancer | CD19 |
| 80 | Cancer | CD20 |
| 81 | Cancer | CD24 |
| 82 | Cancer | CD30 |
| 83 | Cancer | CD33 |
| 84 | Cancer | CD37 |
| 85 | Cancer | CD38 |
| 86 | Cancer | CD4 |
| 87 | Cancer | CD-40 |
| 88 | Cancer | CD40LG |
| 89 | Cancer | CD44 |
| 90 | Cancer | CD-52 |
| 91 | Cancer | CD74 |
| 92 | Cancer | CD80 |
| 93 | Cancer | CDC42 |
| 94 | Cancer | CDC25A |
| 95 | Cancer | CDC25B |
| 96 | Cancer | CDK2 |
| 97 | Cancer | CDK4 |
| 98 | Cancer | CDK4 |
| 99 | Cancer | CDK6 |
| 100 | Cancer | CDK7 |
| 101 | Cancer | CDKN1A |
| 102 | Cancer | CDKN1C |
| 103 | Cancer | CDKN2A |
| 104 | Cancer | CDKN2B |
| 105 | Cancer | CDKN2C |
| 106 | Cancer | c-fos |
| 107 | Cancer | CHEK1 |
| 108 | Cancer | CHEK2 |
| 109 | Cancer | CHMP5 |
| 110 | Cancer | c-ki-RAS |
| 111 | Cancer | CKIT |
| 112 | Cancer | CLTC |
| 113 | Cancer | Clusterin |
| 114 | Cancer | CMET |
| 115 | Cancer | COL6A3 |
| 116 | Cancer | CPK |
| 117 | Cancer | CRAF |
| 118 | Cancer | CRB |
| 119 | Cancer | CRBN |
| 120 | Cancer | CRCT1/TORC1 |
| 121 | Cancer | CRK |
| 122 | Cancer | CRK-II |
| 123 | Cancer | CRM1 |
| 124 | Cancer | Crry |
| 125 | Cancer | CSF1R/FMS |
| 126 | Cancer | CSN5 |
| 127 | Cancer | c-SRC |
| 128 | Cancer | CATG1B |
| 129 | Cancer | CTAG2 |
| 130 | Cancer | CTCF |
| 131 | Cancer | CTFG |
| 132 | Cancer | CTLA-4 |
| 133 | Cancer | CTNNB1 |
| 134 | Cancer | CTSB |
| 135 | Cancer | CTSL2 |
| 136 | Cancer | CX3CL1 |
| 137 | Cancer | CXCL12 |
| 138 | Cancer | CYCS |
| 139 | Cancer | CYLD |
| 140 | Cancer | CYR61 |
| 141 | Cancer | DAL1L |
| 142 | Cancer | DAPK1 |
| 143 | Cancer | DBL |
| 144 | Cancer | DCC |
| 145 | Cancer | DCN |
| 146 | Cancer | DCL1 |
| 147 | Cancer | DDB2 |
| 148 | Cancer | DDOST |
| 149 | Cancer | DDX6 |
| 150 | Cancer | DEK |
| 151 | Cancer | DHFR |
| 152 | Cancer | DIABLO |
| 153 | Cancer | DKK1 |
| 154 | Cancer | DNMT1 |
| 155 | Cancer | DNMT(3A) |
| 156 | Cancer | DNMT(3B) |
| 157 | Cancer | DOT1L |
| 158 | Cancer | DPC4/SMAD4 |
| 159 | Cancer | DPP-IV |
| 160 | Cancer | E2F |
| 161 | Cancer | E2F1 |
| 162 | Cancer | E2F1/RBAP |
| 163 | Cancer | E2F3 |
| 164 | Cancer | EBF1 |
| 165 | Cancer | E-CAD |
| 166 | Cancer | Ecadherin |
| 167 | Cancer | EGF |
| 168 | Cancer | EGFL7 |
| 169 | Cancer | EGFR |
| 170 | Cancer | EGFR/ERBB-1 |
| 171 | Cancer | EGFR/HER1 |
| 172 | Cancer | EIF4A2 |
| 173 | Cancer | eIF-4E |
| 174 | Cancer | ELK1 |
| 175 | Cancer | ELK3 |
| 176 | Cancer | EP300 |
| 177 | Cancer | EPCAM |
| 178 | Cancer | EPH |
| 179 | Cancer | EPHA1 |
| 180 | Cancer | EPHA3 |
| 181 | Cancer | ER |
| 182 | Cancer | ERBB-3 |
| 183 | Cancer | ERG |
| 184 | Cancer | ERK |
| 185 | Cancer | e-selectin (SELE) |
| 186 | Cancer | Estrogen Receptor (ESR1) |
| 187 | Cancer | ETS1 |
| 188 | Cancer | ETS2 |
| 189 | Cancer | ETV6 (TEL) |
| 190 | Cancer | EZH2 |
| 191 | Cancer | FAK |
| 192 | Cancer | FANCA |
| 193 | Cancer | FAP |
| 194 | Cancer | FAS |
| 195 | Cancer | FASLG |
| 196 | Cancer | FBXW7 |
| 197 | Cancer | FER |
| 198 | Cancer | FGF6 |
| 199 | Cancer | FGF7 |
| 200 | Cancer | FGFR-TACC fusion protein |
| 201 | Cancer | FGFR1 |
| 202 | Cancer | FGFR2 |
| 203 | Cancer | FGR |
| 204 | Cancer | Fibroblast growth factor |
| | | (FGF), 1, 2, |
| 205 | Cancer | FLI1/ERGB2 |
| 206 | Cancer | FLI1/ERGB2 |
| 207 | Cancer | FLT1 (VEGFR1) |
| 208 | Cancer | FLT3 |
| 209 | Cancer | FLT4 |
| 210 | Cancer | FMS |
| 211 | Cancer | FOLH1 (PSMA) |
| 212 | Cancer | FOS |
| 213 | Cancer | FOSL1 |
| 214 | Cancer | FOSL2 |
| 215 | Cancer | FOXE1 |
| 216 | Cancer | FPS/FES |
| 217 | Cancer | FRA1 |
| 218 | Cancer | FRA2 |
| 219 | Cancer | FST |
| 220 | Cancer | FT3 |
| 221 | Cancer | FUBP1 |
| 222 | Cancer | Furin |
| 223 | Cancer | FYN |
| 224 | Cancer | GADD45A |
| 225 | Cancer | GADD45B |
| 226 | Cancer | GATA4 |
| 227 | Cancer | GDF2 |
| 228 | Cancer | GIP |
| 229 | Cancer | GLI |
| 230 | Cancer | GNA11 |
| 231 | Cancer | GHAQ |
| 232 | Cancer | GNAS1 |
| 233 | Cancer | GNAS2 |
| 234 | Cancer | GRB-2 |
| 235 | Cancer | GRN |
| 236 | Cancer | GSK3A |
| 237 | Cancer | GSP |
| 238 | Cancer | GST-Pi |
| 239 | Cancer | HAT1 |
| 240 | Cancer | HCK |
| 241 | Cancer | HDAC1 |
| 242 | Cancer | HDAC10 |
| 243 | Cancer | HDAC11 |
| 244 | Cancer | HDAC2 |
| 245 | Cancer | HDAC4 |
| 246 | Cancer | HDAC5 |
| 247 | Cancer | HDAC6 |
| 248 | Cancer | HDAC7 |
| 249 | Cancer | HDAC8 |
| 250 | Cancer | HDAC9 |
| 251 | Cancer | Hedgehog |
| 252 | Cancer | HEK |
| 253 | Cancer | Her-2 |
| 254 | Cancer | HER2/ERBB2 |
| 255 | Cancer | HER3 |
| 256 | Cancer | HER3/ERBB-2 |
| 257 | Cancer | HER4 |
| 258 | Cancer | HER4/ERBB-4 |
| 259 | Cancer | HIF1A |
| 260 | Cancer | HIF2A |
| 261 | Cancer | HIF-1beta |
| 262 | Cancer | HIND |
| 263 | Cancer | hMOF |
| 264 | Cancer | HMGA1 |
| 265 | Cancer | HMGB1 |
| 266 | Cancer | HMTs |
| 267 | Cancer | HOX11 |
| 268 | Cancer | HOXA7 |
| 269 | Cancer | HOXD10 |
| 270 | Cancer | HPC1 |
| 271 | Cancer | HRAS (c-ha-ras) |
| 272 | Cancer | HRX/MLLT1 |
| 273 | Cancer | HRX/MLLT2 |
| 274 | Cancer | Hsp27 |
| 275 | Cancer | Hsp70 (HSPBP1) |
| 276 | Cancer | HSP-90 |
| 277 | Cancer | HST |
| 278 | Cancer | HST2 |
| 279 | Cancer | HSTF1 |
| 280 | Cancer | HTRA3 |
| 281 | Cancer | IDH (2H) |
| 282 | Cancer | IDH1 |
| 283 | Cancer | IDH2 |
| 284 | Cancer | IDO |
| 285 | Cancer | IFNA1 |
| 286 | Cancer | IGF1 |
| 287 | Cancer | IGF1R |
| 288 | Cancer | IGF2 |
| 289 | Cancer | IGFBP2 |
| 290 | Cancer | IGFBP5 |
| 291 | Cancer | IL-17 |
| 292 | Cancer | IL-23 |
| 293 | Cancer | IL3 |
| 294 | Cancer | IL3RA |
| 295 | Cancer | IL4RA |
| 296 | Cancer | IL-6 |
| 297 | Cancer | IL8 |
| 298 | Cancer | ING4 |
| 299 | Cancer | INK4A (p16) |
| 300 | Cancer | INK4B |
| 301 | Cancer | INT-1 |
| 302 | Cancer | INT1/WNT1 |
| 303 | Cancer | INT2 |
| 304 | Cancer | IRF1 |
| 305 | Cancer | IRP2 |
| 306 | Cancer | ITGB1 |
| 307 | Cancer | JAG1 |
| 308 | Cancer | JAK1 |
| 309 | Cancer | JAK2 |
| 310 | Cancer | JAK3 |
| 311 | Cancer | JUN |
| 312 | Cancer | JUNB |
| 313 | Cancer | JUND |
| 314 | Cancer | KAT6A |
| 315 | Cancer | KDM6A |
| 316 | Cancer | KIF5B |
| 317 | Cancer | KIP2 |
| 318 | Cancer | KIT |
| 319 | Cancer | KITLG |
| 320 | Cancer | KRAS |
| 321 | Cancer | KRAS2 |
| 322 | Cancer | KRAS2A |
| 323 | Cancer | KRAS2B |
| 324 | Cancer | KS3 |
| 325 | Cancer | K-SAM |
| 326 | Cancer | KSP |
| 327 | Cancer | LAG3 |
| 328 | Cancer | LATS1 |
| 329 | Cancer | LBC |
| 330 | Cancer | LCK |
| 331 | Cancer | LEF1 |
| 332 | Cancer | LET-7 |
| 333 | Cancer | LIMK1 |
| 334 | Cancer | LMO-1 |
| 335 | Cancer | LMO-2 |
| 336 | Cancer | L-MYC |
| 337 | Cancer | LSD1 |
| 338 | Cancer | 1-selectin |
| 339 | Cancer | LYL1 |
| 340 | Cancer | LYN |
| 341 | Cancer | LYT-10 |
| 342 | Cancer | MADH4 |
| 343 | Cancer | MALT1 |
| 344 | Cancer | MAP2K1 |
| 345 | Cancer | MAP3K3 |
| 346 | Cancer | MAP3K10 |
| 347 | Cancer | MAP3K11 |
| 348 | Cancer | MAP3K14 |
| 349 | Cancer | MAP4K4 |
| 350 | Cancer | MAPK |
| 351 | Cancer | MAPK1 |
| 352 | Cancer | MAPK9 |
| 353 | Cancer | MAS |
| 354 | Cancer | MAS1 |
| 355 | Cancer | MASXL1 |
| 356 | Cancer | MTA2 |
| 357 | Cancer | MAX |
| 358 | Cancer | MCC |
| 359 | Cancer | MCF2 |
| 360 | Cancer | MCL1 |
| 361 | Cancer | MDM2 |
| 362 | Cancer | MDM4 |
| 363 | Cancer | MEF2C |
| 364 | Cancer | MEK1 |
| 365 | Cancer | MEK2 |
| 366 | Cancer | MEN1 |
| 367 | Cancer | MEN2 |
| 368 | Cancer | MET |
| 369 | Cancer | Metabolites |
| 370 | Cancer | Methyltransferase |
| 371 | Cancer | MGLL |
| 372 | Cancer | MGMT |
| 373 | Cancer | MIDHI? |
| 374 | Cancer | MLH1 |
| 375 | Cancer | MLL |
| 376 | Cancer | MLLT1/MLL |
| 377 | Cancer | MLLT2/HRX |
| 378 | Cancer | MLM |
| 379 | Cancer | MMP |
| 380 | Cancer | MMP1 |
| 381 | Cancer | MMP13 |
| 382 | Cancer | MMP2 |
| 383 | Cancer | MMP9 |
| 384 | Cancer | MNK |
| 385 | Cancer | MOS |
| 386 | Cancer | MSH2 |
| 387 | Cancer | MSH6 |
| 388 | Cancer | MTG8/RUNX1 |
| 389 | Cancer | MTOR |
| 390 | Cancer | MTORC2 |
| 391 | Cancer | MUC1 |
| 392 | Cancer | MYB |
| 393 | Cancer | MYBA |
| 394 | Cancer | MYBB |
| 395 | Cancer | MYC (CMYC) |
| 396 | Cancer | MYCC/MCYN |
| 397 | Cancer | MYCL1 |
| 398 | Cancer | MYCLK1 |
| 399 | Cancer | MYCN |
| 400 | Cancer | MYH11//CBFB |
| 401 | Cancer | MXD1 |
| 402 | Cancer | MXI1 |
| 403 | Cancer | NAFT4 |
| 404 | Cancer | NAFT5 |
| 405 | Cancer | NAIP |
| 406 | Cancer | Nampt |
| 407 | Cancer | NANOG |
| 408 | Cancer | NCL (nucleolin) |
| 409 | Cancer | NCOA6 |
| 410 | Cancer | NCOR2 |
| 411 | Cancer | NDN |
| 412 | Cancer | NF1 |
| 413 | Cancer | NF2 |
| 414 | Cancer | NFI-A |
| 415 | Cancer | NFKB |
| 416 | Cancer | NFKB1 |
| 417 | Cancer | NFKB2 |
| 418 | Cancer | NGFR |
| 419 | Cancer | NME1 |
| 420 | Cancer | N-MYC |
| 421 | Cancer | NOS2A |
| 422 | Cancer | NOTCH1 |
| 423 | Cancer | NPM1 |
| 424 | Cancer | NPM1/ALK |
| 425 | Cancer | NPTX1 |
| 426 | Cancer | NR3C1 |
| 427 | Cancer | NRAS |
| 428 | Cancer | NRG/REL |
| 429 | Cancer | NSD3 |
| 430 | Cancer | NTRK1 |
| 431 | Cancer | NUAK1 |
| 432 | Cancer | NUP214 |
| 433 | Cancer | OSM |
| 434 | Cancer | OST |
| 435 | Cancer | OX40/CD134 |
| 436 | Cancer | P2Y12 |
| 437 | Cancer | P53 (TP53) |
| 438 | Cancer | P57/KIP2 |
| 439 | Cancer | p85beta |
| 440 | Cancer | PACE4 |
| 441 | Cancer | PAK4 |
| 442 | Cancer | PALB2 |
| 443 | Cancer | PARP |
| 444 | Cancer | PARP1 |
| 445 | Cancer | PARP2 |
| 446 | Cancer | PAX-5 |
| 447 | Cancer | PBRM1 |
| 448 | Cancer | PBX1/TCF3 |
| 449 | Cancer | PD1 |
| 450 | Cancer | PDCD4 |
| 451 | Cancer | PDFGR/FILP1L1-PDFGRa |
| 452 | Cancer | PDGF |
| 453 | Cancer | PDGFB |
| 454 | Cancer | PDGFR |
| 455 | Cancer | PDGFRA |
| 456 | Cancer | PDL1/2 |
| 457 | Cancer | Pfk |
| 458 | Cancer | Pfkfb3 |
| 459 | Cancer | PGAM1 |
| 460 | Cancer | PHDGH |
| 461 | Cancer | PHF6 |
| 462 | Cancer | PI3K |
| 463 | Cancer | PIGF |
| 464 | Cancer | PIM1 |
| 465 | Cancer | PKCα |
| 466 | Cancer | Pkm2 |
| 467 | Cancer | PKN3 |
| 468 | Cancer | PLAU |
| 469 | Cancer | PLK1 |
| 470 | Cancer | PML/RARA |
| 471 | Cancer | PMS-1 |
| 472 | Cancer | PMS-2 |
| 473 | Cancer | POLK |
| 474 | Cancer | POU4F2 |
| 475 | Cancer | PPARD |
| 476 | Cancer | PPP2CA |
| 477 | Cancer | PPP2R1A |
| 478 | Cancer | PPP2R1B |
| 479 | Cancer | PRAD-1 |
| 480 | Cancer | PRC |
| 481 | Cancer | PRCA1 |
| 482 | Cancer | Prohibitin |
| 483 | Cancer | Proteasome inhibitors |
| 484 | Cancer | PRKCA |
| 485 | Cancer | PRKRA |
| 486 | Cancer | PRKG1 |
| 487 | Cancer | PSDK1 |
| 488 | Cancer | P-Selectin |
| 489 | Cancer | PTCH |
| 490 | Cancer | PTEN |
| 491 | Cancer | PTGS2 |
| 492 | Cancer | PTK2B |
| 493 | Cancer | PTN (pleiotrophin) |
| 494 | Cancer | RAB6A |
| 495 | Cancer | RAB6B |
| 496 | Cancer | RAB21 |
| 497 | Cancer | RAC1 |
| 498 | Cancer | RAC3 |
| 499 | Cancer | RAF |
| 500 | Cancer | RAF1 |
| 501 | Cancer | RAI |
| 502 | Cancer | RANKL |
| 503 | Cancer | RAR-28 |
| 504 | Cancer | RAS |
| 505 | Cancer | RASL10B (VTS58635) |
| 506 | Cancer | RRAS |
| 507 | Cancer | RAASF1 |
| 508 | Cancer | RB1 |
| 509 | Cancer | RBL2 |
| 510 | Cancer | REL |
| 511 | Cancer | RERG |
| 512 | Cancer | RET |
| 513 | Cancer | REST |
| 514 | Cancer | RFC-1 |
| 515 | Cancer | RHOA |
| 516 | Cancer | RHOB |
| 517 | Cancer | RHOBTB2 |
| 518 | Cancer | RHOM-1 |
| 519 | Cancer | RHOM-2 |
| 520 | Cancer | rhPDGF-BB |
| 521 | Cancer | RNA-R2 |
| 522 | Cancer | ROCK2 |
| 523 | Cancer | ROS1 |
| 524 | Cancer | RTKN |
| 525 | Cancer | RUNX1 |
| 526 | Cancer | RUNX1/CBFA2T1 |
| 527 | Cancer | RUNXIT1 |
| 528 | Cancer | SDCBP |
| 529 | Cancer | SEPT9 |
| 530 | Cancer | Ser/Thr |
| 531 | Cancer | SERPINB5 (MASPIN) |
| 532 | Cancer | SET |
| 533 | Cancer | SHC1 |
| 534 | Cancer | SIRT1 |
| 535 | Cancer | SIS |
| 536 | Cancer | SKI |
| 537 | Cancer | SLUG |
| 538 | Cancer | SMAD1 |
| 539 | Cancer | SMAD2 |
| 540 | Cancer | SMAD3 |
| 541 | Cancer | SMAD4 |
| 542 | Cancer | SMAD7 |
| 543 | Cancer | SMARCA4 |
| 544 | Cancer | SFRP1 |
| 545 | Cancer | SKP2 |
| 546 | Cancer | SNAIL |
| 547 | Cancer | SOCS1 |
| 548 | Cancer | SOS |
| 549 | Cancer | SOX2 |
| 550 | Cancer | SOX9 |
| 551 | Cancer | SPANXC |
| 552 | Cancer | SRC1 |
| 553 | Cancer | v-src |
| 554 | Cancer | SST |
| 555 | Cancer | STAT1 |
| 556 | Cancer | STAT3 |
| 557 | Cancer | STK11 |
| 558 | Cancer | STX2 |
| 559 | Cancer | Survivin |
| 560 | Cancer | SYNE1 |
| 561 | Cancer | TACR1 |
| 562 | Cancer | TAL1 |
| 563 | Cancer | TAL2 |
| 564 | Cancer | TAN1 |
| 565 | Cancer | TCF3/PBX1 |
| 566 | Cancer | TCF8/ZEB1 |
| 567 | Cancer | TET2 |
| 568 | Cancer | TFPI2 |
| 569 | Cancer | TFRC (TfR) |
| 570 | Cancer | TGFB1 |
| 571 | Cancer | TGFB2 |
| 572 | Cancer | TGFBR1 |
| 573 | Cancer | TGFBR2 |
| 574 | Cancer | TGF-α |
| 575 | Cancer | TGFβ |
| 576 | Cancer | TGIF2 |
| 577 | Cancer | TGRC |
| 578 | Cancer | THOC1 |
| 579 | Cancer | THRA1 |
| 580 | Cancer | THRB |
| 581 | Cancer | TIAM1 |
| 582 | Cancer | TIE2 |
| 583 | Cancer | TIF1A |
| 584 | Cancer | TIM3/HAVCR2 |
| 585 | Cancer | TIMP1 |
| 586 | Cancer | TIMP2 |
| 587 | Cancer | TIMP3 |
| 588 | Cancer | TIMP4 |
| 589 | Cancer | TK |
| 590 | Cancer | TLX1 |
| 591 | Cancer | TM1 |
| 592 | Cancer | TMEFF2 |
| 593 | Cancer | TNC |
| 594 | Cancer | TNFAIP3 |
| 595 | Cancer | TNFα |
| 596 | Cancer | TNFRSF1A |
| 597 | Cancer | TNFRSF10A |
| 598 | Cancer | TNFRSF11A (RANK) |
| 599 | Cancer | TOP1 |
| 600 | Cancer | TP73L/p63 |
| 601 | Cancer | TPM1 |
| 602 | Cancer | TRIM2 |
| 603 | Cancer | TRK |
| 604 | Cancer | TRKB |
| 605 | Cancer | TrkC |
| 606 | Cancer | TSC1 |
| 607 | Cancer | TSC2 |
| 608 | Cancer | TSG101 |
| 609 | Cancer | Tubulin beta 3 |
| 610 | Cancer | Tubulin beta 5 |
| 611 | Cancer | TUSC2 |
| 612 | Cancer | Twist |
| 613 | Cancer | TWIST1 |
| 614 | Cancer | Tyr |
| 615 | Cancer | Tyrosine Kinase Enzymes |
| 616 | Cancer | VAV |
| 617 | Cancer | VDR |
| 618 | Cancer | VCAM |
| 619 | Cancer | VEGF |
| 620 | Cancer | VEGFA |
| 621 | Cancer | VHL |
| 622 | Cancer | WAF1 |
| 623 | Cancer | WEE1 |
| 624 | Cancer | WIF1 |
| 625 | Cancer | WNT |
| 626 | Cancer | WNT1 |
| 627 | Cancer | WNT2 |
| 628 | Cancer | WT1 |
| 629 | Cancer | XAF1 |
| 630 | Cancer | XIAP |
| 631 | Cancer | XPA/XPG |
| 632 | Cancer | XPO1 |
| 633 | Cancer | YES1 |
| 634 | Cancer | YWHAE |
| 635 | Cancer | YY1 |
| 636 | Cancer | ZAK (MLT) |
| 637 | Cancer | ZEB2 |
| 638 | Cancer | αv-β3 |
| 639 | Cancer | RAD51 |
| 640 | Cancer | RAD51C |
| 641 | Cancer | PPARβ |
| 642 | Cancer | PPARγ |
| 643 | Cancer | SPHK2 |
| 644 | Cancer | SPHK1 |
| 645 | Cancer | TMFRSF5B |
| 646 | Cancer | STAT6 |
| 647 | Cancer | KLF4 |
| 648 | Cardiovascular/Metabolic Disease | ACC |
| 649 | Cardiovascular/Metabolic Disease | ANGPTL3 |
| 650 | Cardiovascular/Metabolic Disease | Apo(a) |
| 651 | Cardiovascular/Metabolic Disease | APOA1 |
| 652 | Cardiovascular/Metabolic Disease | APOA4 |
| 653 | Cardiovascular/Metabolic Disease | APOA5 |
| 654 | Cardiovascular/Metabolic Disease | ApoB |
| 655 | Cardiovascular/Metabolic Disease | ApoB-100 |
| 656 | Cardiovascular/Metabolic Disease | ApoC I |
| 657 | Cardiovascular/Metabolic Disease | ApoC III |
| 658 | Cardiovascular/Metabolic Disease | APOE |
| 659 | Cardiovascular/Metabolic Disease | BACE1 |
| 660 | Cardiovascular/Metabolic Disease | Citrate lyase |
| 661 | Cardiovascular/Metabolic Disease | DGAT2 |
| 662 | Cardiovascular/Metabolic Disease | endotheal lipase |
| 663 | Cardiovascalar/Metabolic Disease | Factor VII |
| 664 | Cardiovascular/Metabolic Disease | Factor IX/F9 |
| 665 | Cardiovascular/Metabolic Disease | FGFR4 |
| 666 | Cardiovascular/Metabolic Disease | GCGR |
| 667 | Cardiovascular/Metabolic Disease | HDL |
| 668 | Cardiovascular/Metabolic Disease | LDL |
| 669 | Cardiovascular/Metabolic Disease | MTTP |
| 670 | Cardiovascular/Metabolic Disease | PAFAH1B2 |
| 671 | Cardiovascular/Metabolic Disease | PCSK9 |
| 672 | Cardiovascular/Metabolic Disease | PTP-1B |
| 673 | Cardiovascalar/Metabolic Disease | VLDL |
| | Cardiovascular/Metabolic Disease | THP—Thrombopoietin for |
| | | essential thrombocytosis |
| 674 | Eye Disease | ARMS2 |
| 675 | Eye Disease | CFH |
| 676 | Eye Disease | C5 |
| 677 | Eye Disease | ERK1 |
| 678 | Eye Disease | ERK2 |
| 679 | Eye Disease | Il-18 |
| 680 | Eye Disease | NGF (proNGF) |
| 681 | Eye Disease | PDGFC |
| 682 | Eye Disease | RTP801 |
| 683 | Eye Disease | TLR4 |
| 684 | Infectious Disease | ACEE |
| 685 | Infectious Disease | aroA |
| 686 | Infectious Disease | aroC |
| 687 | Infectious Disease | B2M |
| 688 | Infectious Disease | carA |
| 689 | Infectious Disease | CASP1 |
| 690 | Infectious Disease | celB |
| 691 | Infectious Disease | cflA |
| 692 | Infectious Disease | cglA |
| 693 | Infectious Disease | cglE |
| 694 | Infectious Disease | cilA |
| 695 | Infectious Disease | cilB |
| 696 | Infectious Disease | cilC |
| 697 | Infectious Disease | cilD |
| 698 | Infectious Disease | cilE |
| 699 | Infectious Disease | cinA |
| 700 | Infectious Disease | CCL3 |
| 701 | Infectious Disease | CCL4 |
| 702 | Infectious Disease | CCR5 |
| 703 | Infectious Disease | CD14 |
| 704 | Infectious Disease | CD28 |
| 705 | Infectious Disease | CHIT1 |
| 706 | Infectious Disease | coiA |
| 707 | Infectious Disease | comA |
| 708 | Infectious Disease | comC |
| 709 | Infectious Disease | comX |
| 710 | Infectious Disease | CSF3 |
| 711 | Infectious Disease | CTL |
| 712 | Infectious Disease | DDX25 |
| 713 | Infectious Disease | DMC1 |
| 714 | Infectious Disease | Ebola |
| 715 | Infectious Disease | envZ |
| 716 | Infectious Disease | epsA |
| 717 | Infectious Disease | F3 |
| 718 | Infectious Disease | F8 |
| 719 | Infectious Disease | FKBP8 |
| 720 | Infectious Disease | Food borne pathogens |
| 721 | Infectious Disease | H1N1 |
| 722 | Infectious Disease | H3N2 |
| 723 | Infectious Disease | H5N1 |
| 724 | Infectious Disease | HBx |
| 725 | Infectious Disease | Hep-A |
| 726 | Infectious Disease | Hep-B |
| 727 | Infectious Disease | Hep-C |
| 728 | Infectious Disease | HIV |
| 729 | Infectious Disease | HLA-A |
| 730 | Infectious Disease | HLA-B |
| 731 | Infectious Disease | HLA-C |
| 732 | Infectious Disease | HP |
| 733 | Infectious Disease | HSPD1 |
| 734 | Infectious Disease | IDO1 |
| 735 | Infectious Disease | IL1B |
| 736 | Infectious Disease | IL6 |
| 737 | Infectious Disease | IL12RB2 |
| 738 | Infectious Disease | IL15 |
| 739 | Infectious Disease | IL17A |
| 740 | Infectious Disease | IL1RN |
| 741 | Infectious Disease | Influenza RNA-dependent |
| | | RNA polymerase |
| 742 | Infectious Disease | INS |
| 743 | Infectious Disease | LACTB |
| 744 | Infectious Disease | LTA |
| 745 | Infectious Disease | Malaria |
| 746 | Infectious Disease | MBL2 |
| 747 | Infectious Disease | MIF |
| 748 | Infections Disease | miR-122 |
| 749 | Infectious Disease | MMP3 |
| 750 | Infectious Disease | NS1A |
| 751 | Infectious Disease | NS5A |
| 752 | Infectious Disease | ompF |
| 753 | Infectious Disease | ostA |
| 754 | Infectious Disease | pbpG |
| 755 | Infectious Disease | PPIA |
| 756 | Infectious Disease | Protease Inhibitors |
| 757 | Infectious Disease | PRTN3 |
| 758 | Infectious Disease | PTK |
| 759 | Infectious Disease | PTPRC/CD45 |
| 760 | Infectious Disease | pyrC |
| 761 | Infectious Disease | relA |
| 762 | Infectious Disease | retinoic acid receptors/ |
| | | retinoids |
| 763 | Infectious Disease | rpmA |
| 764 | Infectious Disease | rstA |
| 765 | Infectious Disease | RSV |
| 766 | Infectious Disease | RSV |
| 767 | Infectious Disease | SARS |
| 768 | Infectious Disease | secE |
| 769 | Infectious Disease | SELL |
| 770 | Infectious Disease | SERPINA1 |
| 771 | Infectious Disease | SLC11A1 |
| 772 | Infectious Disease | spsC |
| 773 | Infectious Disease | tcdA |
| 774 | Infectious Disease | tcdB |
| 775 | Infectious Disease | TLR2 |
| 776 | Infectious Disease | TLR7 |
| 777 | Infectious Disease | TNF |
| 778 | Infectious Disease | TNFRSF1B |
| 779 | Infectious Disease | TNFRSF8 |
| 780 | Infectious Disease | trmD |
| 781 | Infectious Disease | uppP |
| 782 | Infectious Disease | West Nile |
| 783 | Inflammation | ACEI |
| 784 | Inflammation | ADAMS |
| 785 | Inflammation | ADAMTS |
| 786 | Inflammation | AGER |
| 787 | Inflammation | Aldosterone |
| 788 | Inflammation | ALK5 |
| 789 | Inflammation | Aminoglycoside |
| 790 | Inflammation | ARB |
| 791 | Inflammation | ATG16L1 |
| 792 | Inflammation | BDKRB1 |
| 793 | Inflammation | bFGF |
| 794 | Inflammation | BMP-7 |
| 795 | Inflammation | c-abl |
| 796 | Inflammation | CaMKIV |
| 797 | Inflammation | CASP14 |
| 798 | Inflammation | CCL2/CCL2 receptor |
| 799 | Inflammation | CCL13 |
| 800 | Inflammation | CCN2 |
| 801 | Inflammation | CCR1 |
| 802 | Inflammation | CCR2 |
| 803 | Inflammation | CCR9 |
| 804 | Inflammation | CCR10 |
| 805 | Inflammation | CD97 |
| 806 | Inflammation | COX |
| 807 | Inflammation | CRP |
| 808 | Inflammation | CTGF |
| 809 | Inflammation | CX3CR1 |
| 810 | Inflammation | CXCR-4 |
| 811 | Inflammation | CXCR-7 |
| 812 | Inflammation | Endothelin |
| 813 | Inflammation | ELANE |
| 814 | Inflammation | EPO |
| 815 | Inflammation | F2RL1 |
| 816 | Inflammation | FPR1 |
| 817 | Inflammation | FPR2 |
| 818 | Inflammation | GPR84 |
| 819 | Inflammation | GZMB |
| 820 | Inflammation | Hepcidin (HAMP) |
| 821 | Inflammation | HGF |
| 822 | Inflammation | HRH4 |
| 823 | Inflammation | ICAM-1 |
| 824 | Inflammation | IFNG |
| 825 | Inflammation | IL1 |
| 826 | Inflammation | IL10 |
| 827 | Inflammation | IL12 |
| 828 | Inflammation | IL13 |
| 829 | Inflammation | IL2 |
| 830 | Inflammation | IL4 |
| 831 | Inflammation | Il-5 |
| 832 | Inflammation | IL7 |
| 833 | Inflammation | Integrin α4β7 |
| 834 | Inflammation | JNK |
| 835 | Inflammation | KNG1 |
| 836 | Inflammation | MAPK14 |
| 837 | Inflammation | MCP1 |
| 838 | Inflammation | M-CSF |
| 839 | Inflammation | MIF1 |
| 840 | Inflammation | MYD88 |
| 841 | Inflammation | Nitric Oxide |
| 842 | Inflammation | NOD2 |
| 843 | Inflammation | NR1H2 |
| 844 | Inflammation | P38 MAPK |
| 845 | Inflammation | PAI-1 |
| 846 | Inflammation | PLA2G2D |
| 847 | Inflammation | PLA2G7 |
| 848 | Inflammation | PLA2G10 |
| 849 | Inflammation | plasminogen |
| 850 | Inflammation | PLCγ |
| 851 | Inflammation | PPIG |
| 852 | Inflammation | PPARα |
| 853 | Inflammation | PSGL-1 |
| 854 | Inflammation | PTGDR |
| 855 | Inflammation | PTGDR2 |
| 856 | Inflammation | Rantes (CCL5) |
| 857 | Inflammation | Renin |
| 858 | Inflammation | ROCK (Rho-kinase) |
| 859 | Inflammation | SAA1 |
| 860 | Inflammation | SAP |
| 861 | Inflammation | SCGB1A1 |
| 862 | Inflammation | SELPLG |
| 863 | Inflammation | Smads (1, 2, 3, 5) |
| 864 | Inflammation | SYK |
| 865 | Inflammation | TLR9 |
| 866 | Inflammation | TSLP |
| 867 | Inflammation | TNFAIP6 |
| 868 | Inflammation | TNFAIP8L2 |
| 869 | Inflammation | tpa |
| 870 | Inflammation | uPA |
| 871 | Inflammation | Vasopeptidase |
| 872 | Inflammation | VLA-4 |
| 873 | Inflammation | XBP1 |
| 874 | Neurological Disease | alpha-synuclein |
| 875 | Neurological Disease | ApoE 4 |
| 876 | Neurological Disease | APP |
| 877 | Neurological Disease | Beta amyloid |
| 878 | Neurological Disease | CDK5R2 |
| 879 | Neurological Disease | CLU |
| 880 | Neurological Disease | COX2 |
| 881 | Neurological Disease | CR1 |
| 882 | Neurological Disease | ErbB |
| 883 | Neurological Disease | FRA10AC1 |
| 884 | Neurological Disease | GBA |
| 885 | Neurological Disease | GNAS |
| 886 | Neurological Disease | GPCR |
| 887 | Neurological Disease | GRM1 |
| 888 | Neurological Disease | GUSB |
| 889 | Neurological Disease | has-mir-29b |
| 890 | Neurological Disease | has-mir-29c |
| 891 | Neurological Disease | HDAC3 |
| 892 | Neurological Disease | hnRNPA1 |
| 893 | Neurological Disease | hnRNPA2B1 |
| 894 | Neurological Disease | hsa-miR-137 |
| 895 | Neurological Disease | HTT |
| 896 | Neurological Disease | IAPP |
| 897 | Neurological Disease | LRRK2 |
| 898 | Neurological Disease | MAPT |
| 899 | Neurological Disease | MBP |
| 900 | Neurological Disease | MDK (Midkine) |
| 901 | Neurological Disease | MT-ATP6 |
| 902 | Neurological Disease | PARK |
| 903 | Neurological Disease | PARK7 |
| 904 | Neurological Disease | PBP |
| 905 | Neurological Disease | PDE1B |
| 906 | Neurological Disease | PICALM |
| 907 | Neurological Disease | PINK1 |
| 908 | Neurological Disease | PON1 |
| 909 | Neurological Disease | PPARGC1B |
| 910 | Neurological Disease | PRNP |
| 911 | Neurological Disease | PSEN1 |
| 912 | Neurological Disease | PSEN2 |
| 913 | Neurological Disease | RAGE |
| 914 | Neurological Disease | SERPINA3 |
| 915 | Neurological Disease | SNCA |
| 916 | Neurological Disease | SOD1 |
| 917 | Neurological Disease | SPON1 |
| 918 | Neurological Disease | SPP1 |
| 919 | Neurological Disease | STH |
| 920 | Neurological Disease | Supt4h |
| 921 | Neurological Disease | Tau |
| 922 | Neurological Disease | TOMM40 |
| 923 | Neurological Disease | TUBA3 |
| 924 | Neurological Disease | Ubiquilin-2 |
| 925 | Rare Disease | AAT |
| 926 | Rare Disease | ABCG5 |
| 927 | Rare Disease | ACHE |
| 928 | Rare Disease | ADA |
| 929 | Rare Disease | AGXT |
| 930 | Rare Disease | AIRE |
| 931 | Rare Disease | ALAS-1 |
| 932 | Rare Disease | ALDH2 |
| 933 | Rare Disease | alpha-1 antritrypsisn |
| 934 | Rare Disease | AMPH |
| 935 | Rare Disease | antithrombin |
| 936 | Rare Disease | AQP2 |
| 937 | Rare Disease | ASPA |
| 938 | Rare Disease | APT7A |
| 939 | Rare Disease | ATP7B |
| 940 | Rare Disease | AVPR2 |
| 941 | Rare Disease | BSCL2 |
| 942 | Rare Disease | C1S |
| 943 | Rare Disease | CCL3L1 |
| 944 | Rare Disease | CD79A |
| 945 | Rare Disease | CTLA4 |
| 946 | Rare Disease | CYB5R3 |
| 947 | Rare Disease | CYP117A1 |
| 948 | Rare Disease | CYBB |
| 949 | Rare Disease | CYP21A2 |
| 950 | Rare Disease | CYP27A1 |
| 951 | Rare Disease | DMPK |
| 952 | Rare Disease | ENO2 |
| 953 | Rare Disease | F2 |
| 954 | Rare Disease | F5 |
| 955 | Rare Disease | F10 |
| 956 | Rare Disease | FGF23 |
| 957 | Rare Disease | FRAXA |
| 958 | Rare Disease | FRAXE |
| 959 | Rare Disease | GAA |
| 960 | Rare Disease | GAD1 |
| 961 | Rare Disease | GCCR |
| 962 | Rare Disease | GCK |
| 963 | Rare Disease | GDNF |
| 964 | Rare Disease | GFAP |
| 965 | Rare Disease | GH1 |
| 966 | Rare Disease | GHR |
| 967 | Rare Disease | GJB1 |
| 968 | Rare Disease | GLA |
| 969 | Rare Disease | GLRA1 |
| 970 | Rare Disease | GYS2 |
| 971 | Rare Disease | HADHA |
| 972 | Rare Disease | HFE |
| 973 | Rare Disease | IGES |
| 974 | Rare Disease | IPW |
| 975 | Rare Disease | KCNJ2 |
| 976 | Rare Disease | KRT6A (Keratin K6a) |
| 977 | Rare Disease | KRT81 |
| 978 | Rare Disease | KRT86 |
| 979 | Rare Disease | LMAN1 |
| 980 | Rare Disease | LMNA |
| 981 | Rare Disease | MPL |
| 982 | Rare Disease | MPZ |
| 983 | Rare Disease | NEU1 |
| 984 | Rare Disease | NPC1 |
| 985 | Rare Disease | NPC2 |
| 986 | Rare Disease | NR0B1 |
| 987 | Rare Disease | NR3C2 |
| 988 | Rare Disease | PKK |
| 989 | Rare Disease | PMP22 |
| 990 | Rare Disease | PYGM |
| 991 | Rare Disease | RETN |
| 992 | Rare Disease | SAG |
| 993 | Rare Disease | SCNN1A |
| 994 | Rare Disease | SH2D1A |
| 995 | Rare Disease | SLC2A1 (Glut1) |
| 996 | Rare Disease | SMN2 |
| 997 | Rare Disease | SMPD1 |
| 998 | Rare Disease | SNRPN |
| 999 | Rare Disease | THBD |
| 1000 | Rare Disease | STAR |
| 1001 | Rare Disease | SYP |
| 1002 | Rare Disease | TRD |
| 1003 | Rare Disease | TSHB |
| 1004 | Rare Disease | Tmprss6 |
| 1005 | Rare Disease | TTR |
| 1006 | Rare Disease | UBE3A |
| 1007 | Rare Disease | WAS |
| 1008 | Rare Disease | WRN |
| 1009 | Rare Disease | Dentatorubropallidoluysian |
| | | Atrophy |
| 1010 | Rare Disease | Huntington′s Disease |
| 1011 | Rare Disease | Spinobulbar Muscular |
| | | Atrophy |
| 1012 | Rare Disease | SCA1 (Spinocerebellar Ataxia |
| | | Type 1) |
| 1013 | Rare Disease | SCA2 (Spinocerebellar Ataxia |
| | | Type 2) |
| 1014 | Rare Disease | SCA3 (Spinocerebellar Ataxia |
| | | Type 3 or Machado-Joseph |
| | | Disease) |
| 1015 | Rare Disease | SCA6 (Spinocerebellar Ataxia |
| | | Type 6) |
| 1016 | Rare Disease | SCA7 (Spinocerebellar Ataxia |
| | | Type 7) |
| 1017 | Rare Disease | Fragile X Syndrome |
| 1018 | Rare Disease | Fragile XE Mental |
| | | Retardation |
| 1019 | Rare Disease | Friedreich′s Ataxia |
| 1020 | Rare Disease | Myotonic Dystrophy |
| 1021 | Rare Disease | Spinocerebellar Ataxia |
| | | Type 8 |
| 1022 | Rare Disease | Spinocerebellar Ataxia |
| | | Type 12 |
| 1023 | Rare Disease | SPT4 |
| 1024 | Rare Disease | ATN1 |
| 1025 | Rare Disease | DRPLA |
| 1026 | Rare Disease | HTT |
| 1027 | Rare Disease | ATXN1 |
| 1028 | Rare Disease | ATXN2 |
| 1029 | Rare Disease | ATXN3 |
| 1030 | Rare Disease | CACNA1A |
| 1031 | Rare Disease | ATXN7 |
| 1032 | Rare Disease | TBP |
| 1033 | Rare Disease | FMR1 |
| 1034 | Rare Disease | AFF2 |
| 1035 | Rare Disease | FXN |
| 1036 | Rare Disease | SCA8 |
| 1037 | Rare Disease | PPP2R2B |
| 1038 | Stem Cells | Cancer Stem Cells |
| 1039 | Stem Cells | Cardiac Stem Cells |
| 1040 | Stem Cells | Kidney Stem Cells |
| 1041 | Stem Cells | Embryonic Stem Cells |
| 1042 | Stem Cells | Tissue Stem Cells |
| 1043 | Stem Cells | Induced Pluripotent Stem |
| | | Cells |
| 1044 | Stem Cells | Blood Stem Cells |
| 1045 | Stem Cells | Mescenchymal Stem Cells |
| 1046 | Stem Cells | Cord Blood Stem Cells |

[0280] Non-Cancer Targets

[0281] The present invention is not limited to the targeting of cancer genes. The methods and compositions of the present invention find use in the targeting of any gene that it is desirable to down regulate the expression of. For example, targets for immune and/or surface antigens or immune surveillance targets, angiogenic receptors, proteins and factors (kinases, heat shock, hypoxic, oxidative stress gene/protein targets), monogenic diseases, inflammation, gene transcription (transcription factors, cis regulatory elements), cell recognition receptors, cell signaling receptors, cell death (autophagy, necrosis, apoptosis), cell adhesion, survival targets (resistance), metastases targets (brain, primary to secondary tumors), chemokines/cytokines, EMT/MET, immune cell activation factors, multidrug resistance, viral proteins and viral recognition proteins, psoriasis, dermatitis and eczema

[0282] Extracellular matrix, stromal or connective tissue genes/proteins, coagulation factors and platelet aggregation or platelet overproduction, and growth factors.

[0283] For example, in some embodiments, the genes to be targeted include, but are not limited to, an immunoglobulin or antibody gene, a clotting factor gene, a protease, a pituitary hormone, a protease inhibitor, a growth factor, a somatomedian, a gonadotrophin, a chemotactin, a chemokine, a plasma protein, a plasma protease inhibitor, an interleukin, an interferon, a cytokine, a transcription factor, or a pathogen target (e.g., a viral gene, a bacterial gene, a microbial gene, a fungal gene).

[0284] In other embodiments and gene from a pathogen is targeted. Exemplary pathogens include, but are not limited to, Human Immunodeficiency virus (CD4, APOBEC3G, Vif, LEDGF/p75), Hepatitis B virus, hepatitis C virus (SR-B1, scavenger receptor type B1; CLDN-1, claudin-1; OCLN, occluding), hepatitis A virus, respiratory syncytial virus, pathogens involved in severe acute respiratory syndrome, west nile virus, and food borne pathogens (e.g., E. coli).

[0285] The lists of Cancer and Non-Cancer targets from above is intended to be specific and accurate, but in addition to the targets above we have further found and we describe in even greater detail the targets listed below, comprising both cancer and non-cancer targets, presented in no particular order. These targets are especially well suited for DNAi targeting and therapy. The preferred list of targets is provided with the sections that follow which provided detailed descriptions of over 40 genes. These gene targets are numbered below, 1-30. Included with a description of many of these preferred targets are the background relevance of the gene, gene identification, the targeted oligonucleotide sequences, the hot zones, and the 5′ upstream genetic code.

### EXPERIMENTALS

[0286] These examples are provided in order to demonstrate and further illustrate certain preferred embodiments and aspects of the present invention and are not to be construed as limiting the scope thereof.

[0287] In the experimental disclosure which follows, the following abbreviations apply: N (normal); M (molar); mM (millimolar); μM (micromolar); mol (moles); mmol (millimoles); μmol (micromoles); nmol (nanomoles); pmol (picomoles); g (grams); mg (milligrams); μg (micrograms); ng (nanograms); 1 or L (liters); ml (milliliters); μl (microliters); cm (centimeters); mm (millimeters); μm (micrometers); nm (nanometers); and ° C. (degrees Centigrade).

[0288] 1) Survivin. Survivin (BIRC5) also called buloviral inhibitor of apoptosis repeat-containing 5 is a member of the inhibitor of apoptosis family that is expressed during mitosis in a cell cycle-dependent manner. Survivin is localized to different components of the mitotic apparatus, plays an important role in both cell division and inhibition of apoptosis. Survivin is not expressed in normal adult tissue, but is widely expressed in a majority of cancers (Fukuda and Pelus, Mol Cancer Ther 2006; 5 1087-1098), often with poor prognosis. Survivin inhibits caspase activation, the key effector enzyme in programmed cell death, and as a result there is uncontrolled growth and drug resistance. The inhibition of survivin leads to increased apoptosis and decreased tumor growth and sensitizes cells to various therapeutic interventions including chemotherapies and targeted therapies against cancer targets. Survivin expression is increased in tumors and regulated by the cell cycle (expressed in mitosis in a cell cycle dependent manner); expression is also linked to p53 and is targeted by the WNT1 pathway and is upregulated by β-catenin. A review of approaches targeted against survivin may be found in “Targeting surviving in cancer: a patent review” (Expert Opinion on Therapeutic Patents, December 2010, Vol. 20, No. 12: Pages 1723-1737).

[0289] An antisense therapeutic being developed (LY2181308) downregulates survivin expression in human cancer cells derived from lung, colon, pancreas, liver, breast, prostate, ovary, cervix, skin, and brain as measured by quantitative RT-PCR and immunoblotting analysis (Carrasco et al., Mol Cancer Ther 2011; 10(2); 221-32). Specific inhibition of survivin expression in multiple cancer cell lines induced caspase-3-dependent apoptosis, cell cycle arrest in the G2-M phase, and multinucleated cells and sensitized tumor cells to chemotherapeutic-induced apoptosis. In an in vivo human xenograft tumor model, LY2181308 produced significant antitumor activity as compared with saline or its sequence-specific control oligonucleotide and sensitized to gemcitabine, paclitaxel, and docetaxel with inhibition of surviving expression in xenograft tumors. LY2181308 is being evaluated in a clinical setting (Phase II) in combination with docetaxel for the treatment of prostate cancer.

[0290] Protein: Survivin Gene: BIRC5 (Homo sapiens, chromosome 17, 76210277-76221716 [NCBI Reference Sequence: NC_{—}000017.10]; start site location: 76210398; strand: positive)

Gene Identification

| | |
|---|---|
| GeneID | 332 |
| HGNC | 593 |
| HPRD | 04520 |
| MIM | 603352 |

Targeted Sequences

| | | | Relative |
|---|---|---|---|
| | | | upstream |
| | | | location |
| Se- | | | to gene |
| quence | Design | | start |
| ID No: | ID | Sequence (5′-3′) | site |
| 1 | SU1 | GAGCGCACGCCCTCTTAGGCGG | 73 |
| 75 | SU2 | CACCCCGAGGTACGATCAGTGCGTACC | 2990 |
| 105 | SU3 | GACATCGCTGTCCCGGCGAGTACATCGTT | 665 |
| 155 | SU1_02 | GAGCGCACGCCCTCTTAGGCG | 73 |
| 229 | SU1_03 | GAGCGCACGCCCTCTTAGGCGGTCCA | 73 |
| 303 | | GTCGCCCCTGGGTCCTGCTGATTGGC | 1918 |
| 322 | | CAGCGAGCCTGGGCCCCATCGGCACATCT | 2905 |
| 357 | | CCCGCGGCCTTCTGGGAGTAGAGGC | 102 |
| 431 | | TCCCGGCGAGTACATCGTTGACTGCACG | 675 |
| 481 | | AACCTCCTCCCCGCCACGGGTT | 1229 |

Target Shift Sequences

| | | Relative |
|---|---|---|
| | | upstream |
| | | location |
| Sequence | | to gene |
| ID No: | Sequence (5′-3′) | start site |
| 1 | GAGCGCACGCCCTCTTAGGCGG | 77 |
| 2 | AGCGCACGCCCTCTTAGGCG | 78 |
| 3 | GCGCACGCCCTCTTAGGCGG | 79 |
| 4 | CGCACGCCCTCTTAGGCGGT | 80 |
| 5 | GCACGCCCTCTTAGGCGGTC | 81 |
| 6 | CACGCCCTCTTAGGCGGTCC | 82 |
| 7 | ACGCCCTCTTAGGCGGTCCA | 83 |
| 8 | CGCCCTCTTAGGCGGTCCAC | 84 |
| 9 | GCCCTCTTAGGCGGTCCACC | 85 |
| 10 | CCCTCTTAGGCGGTCCACCC | 86 |
| 11 | CCTCTTAGGCGGTCCACCCC | 87 |
| 12 | CTCTTAGGCGGTCCACCCCC | 88 |
| 13 | TCTTAGGCGGTCCACCCCCC | 89 |
| 14 | CTTAGGCGGTCCACCCCCCG | 90 |
| 15 | TTAGGCGGTCCACCCCCCGC | 91 |
| 16 | TAGGCGGTCCACCCCCCGCG | 92 |
| 17 | AGGCGGTCCACCCCCCGCGG | 93 |
| 18 | GGCGGTCCACCCCCCGCGGC | 94 |
| 19 | GCGGTCCACCCCCCGCGGCC | 95 |
| 20 | CGGTCCACCCCCCGCGGCCT | 96 |
| 21 | GGTCCACCCCCCGCGGCCTT | 97 |
| 22 | GTCCACCCCCCGCGGCCTTC | 98 |
| 23 | TCCACCCCCCGCGGCCTTCT | 99 |
| 24 | CCACCCCCCGCGGCCTTCTG | 100 |
| 25 | CACCCCCCGCGGCCTTCTGG | 101 |
| 26 | ACCCCCCGCGGCCTTCTGGG | 102 |
| 27 | CCCCCCGCGGCCTTCTGGGA | 103 |
| 28 | CCCCCGCGGCCTTCTGGGAG | 104 |
| 29 | CCCCGCGGCCTTCTGGGAGT | 105 |
| 30 | CCCGCGGCCTTCTGGGAGTA | 106 |
| 31 | CCGCGGCCTTCTGGGAGTAG | 107 |
| 32 | CGCGGCCTTCTGGGAGTAGA | 108 |
| 33 | GCGGCCTTCTGGGAGTAGAG | 109 |
| 34 | CGGCCTTCTGGGAGTAGAGG | 110 |
| 35 | GGAGCGCACGCCCTCTTAGG | 76 |
| 36 | GGGAGCGCACGCCCTCTTAG | 75 |
| 37 | CGGGAGCGCACGCCCTCTTA | 74 |
| 38 | TCGGGAGCGCACGCCCTCTT | 73 |
| 39 | GTCGGGAGCGCACGCCCTCT | 72 |
| 40 | TGTCGGGAGCGCACGCCCTC | 71 |
| 41 | ATGTCGGGAGCGCACGCCCT | 70 |
| 42 | CATGTCGGGAGCGCACGCCC | 69 |
| 43 | GCATGTCGGGAGCGCACGCC | 68 |
| 44 | GGCATGTCGGGAGCGCACGC | 67 |
| 45 | GGGCATGTCGGGAGCGCACG | 66 |
| 46 | GGGGCATGTCGGGAGCGCAC | 65 |
| 47 | CGGGGCATGTCGGGAGCGCA | 64 |
| 48 | GCGGGGCATGTCGGGAGCGC | 63 |
| 49 | CGCGGGGCATGTCGGGAGCG | 62 |
| 50 | CCGCGGGGCATGTCGGGAGC | 61 |
| 51 | GCCGCGGGGCATGTCGGGAG | 60 |
| 52 | CGCCGCGGGGCATGTCGGGA | 59 |
| 53 | GCGCCGCGGGGCATGTCGGG | 58 |
| 54 | CGCGCCGCGGGGCATGTCGG | 57 |
| 55 | GCGCGCCGCGGGGCATGTCG | 56 |
| 56 | GGCGCGCCGCGGGGCATGTC | 55 |
| 57 | TGGCGCGCCGCGGGGCATGT | 54 |
| 58 | ATGGCGCGCCGCGGGGCATG | 53 |
| 59 | AATGGCGCGCCGCGGGGCAT | 52 |
| 60 | TAATGGCGCGCCGCGGGGCA | 51 |
| 61 | TTAATGGCGCGCCGCGGGGC | 50 |
| 62 | GTTAATGGCGCGCCGCGGGG | 49 |
| 63 | GGTTAATGGCGCGCCGCGGG | 48 |
| 64 | CGGTTAATGGCGCGCCGCGG | 47 |
| 65 | GCGGTTAATGGCGCGCCGCG | 46 |
| 66 | GGCGGTTAATGGCGCGCCGC | 45 |
| 67 | TGGCGGTTAATGGCGCGCCG | 44 |
| 68 | CTGGCGGTTAATGGCGCGCC | 43 |
| 69 | TCTGGCGGTTAATGGCGCGC | 42 |
| 70 | ATCTGGCGGTTAATGGCGCG | 41 |
| 71 | AATCTGGCGGTTAATGGCGC | 40 |
| 72 | AAATCTGGCGGTTAATGGCG | 39 |
| 73 | CAAATCTGGCGGTTAATGGC | 38 |
| 74 | TCAAATCTGGCGGTTAATGG | 37 |
| 75 | CACCCCGAGGTACGATCAGTGCGTACC | 2994 |
| 76 | ACCCCGAGGTACGATCAGTG | 2995 |
| 77 | CCCCGAGGTACGATCAGTGC | 2996 |
| 78 | CCCGAGGTACGATCAGTGCG | 2997 |
| 79 | CCGAGGTACGATCAGTGCGT | 2998 |
| 80 | CGAGGTACGATCAGTGCGTA | 2999 |
| 81 | GAGGTACGATCAGTGCGTAC | 3000 |
| 82 | AGGTACGATCAGTGCGTACC | 3001 |
| 83 | GGTACGATCAGTGCGTACCA | 3002 |
| 84 | GTACGATCAGTGCGTACCAA | 3003 |
| 85 | TACGATCAGTGCGTACCAAG | 3004 |
| 86 | ACGATCAGTGCGTACCAAGT | 3005 |
| 87 | CGATCAGTGCGTACCAAGTA | 3006 |
| 88 | GATCAGTGCGTACCAAGTAC | 3007 |
| 89 | ATCAGTGCGTACCAAGTACA | 3008 |
| 90 | TCAGTGCGTACCAAGTACAT | 3009 |
| 91 | CAGTGCGTACCAAGTACATA | 3010 |
| 92 | CCACCCCGAGGTACGATCAG | 2993 |
| 93 | CCCACCCCGAGGTACGATCA | 2992 |
| 94 | TCCCACCCCGAGGTACGATC | 2991 |
| 95 | CTCCCACCCCGAGGTACGAT | 2990 |
| 96 | TCTCCCACCCCGAGGTACGA | 2989 |
| 97 | TTCTCCCACCCCGAGGTACG | 2988 |
| 98 | CTTCTCCCACCCCGAGGTAC | 2987 |
| 99 | TCTTCTCCCACCCCGAGGTA | 2986 |
| 100 | CTCTTCTCCCACCCCGAGGT | 2985 |
| 101 | TCTCTTCTCCCACCCCGAGG | 2984 |
| 102 | CTCTCTTCTCCCACCCCGAG | 2983 |
| 103 | CCTCTCTTCTCCCACCCCGA | 2982 |
| 104 | CCCTCTCTTCTCCCACCCCG | 2981 |
| 105 | GACATCGCTGTCCCGGCGAGTACATCGTT | 669 |
| 106 | ACATCGCTGTCCCGGCGAGT | 670 |
| 107 | CATCGCTGTCCCGGCGAGTA | 671 |
| 108 | ATCGCTGTCCCGGCGAGTAC | 672 |
| 109 | TCGCTGTCCCGGCGAGTACA | 673 |
| 110 | CGCTGTCCCGGCGAGTACAT | 674 |
| 111 | GCTGTCCCGGCGAGTACATC | 675 |
| 112 | CTGTCCCGGCGAGTACATCG | 676 |
| 113 | TGTCCCGGCGAGTACATCGT | 677 |
| 114 | GTCCCGGCGAGTACATCGTT | 678 |
| 115 | TCCCGGCGAGTACATCGTTG | 679 |
| 116 | CCCGGCGAGTACATCGTTGA | 680 |
| 117 | CCGGCGAGTACATCGTTGAC | 681 |
| 118 | CGGCGAGTACATCGTTGACT | 682 |
| 119 | GGCGAGTACATCGTTGACTG | 683 |
| 120 | GCGAGTACATCGTTGACTGC | 684 |
| 121 | CGAGTACATCGTTGACTGCA | 685 |
| 122 | GAGTACATCGTTGACTGCAC | 686 |
| 123 | AGTACATCGTTGACTGCACG | 687 |
| 124 | GTACATCGTTGACTGCACGA | 688 |
| 125 | TACATCGTTGACTGCACGAC | 689 |
| 126 | ACATCGTTGACTGCACGACC | 690 |
| 127 | CATCGTTGACTGCACGACCT | 691 |
| 128 | ATCGTTGACTGCACGACCTG | 692 |
| 129 | TCGTTGACTGCACGACCTGG | 693 |
| 130 | CGTTGACTGCACGACCTGGG | 694 |
| 131 | GTTGACTGCACGACCTGGGT | 695 |
| 132 | TTGACTGCACGACCTGGGTT | 696 |
| 133 | TGACTGCACGACCTGGGTTT | 697 |
| 134 | GACTGCACGACCTGGGTTTC | 698 |
| 135 | ACTGCACGACCTGGGTTTCC | 699 |
| 136 | CTGCACGACCTGGGTTTCCA | 700 |
| 137 | TGCACGACCTGGGTTTCCAG | 701 |
| 138 | GCACGACCTGGGTTTCCAGG | 702 |
| 139 | CACGACCTGGGTTTCCAGGA | 703 |
| 140 | ACGACCTGGGTTTCCAGGAG | 704 |
| 141 | CGACCTGGGTTTCCAGGAGG | 705 |
| 142 | AGACATCGCTGTCCCGGCGA | 668 |
| 143 | CAGACATCGCTGTCCCGGCG | 667 |
| 144 | GCAGACATCGCTGTCCCGGC | 666 |
| 145 | AGCAGACATCGCTGTCCCGG | 665 |
| 146 | CAGCAGACATCGCTGTCCCG | 664 |
| 147 | GCAGCAGACATCGCTGTCCC | 663 |
| 148 | TGCAGCAGACATCGCTGTCC | 662 |
| 149 | GTGCAGCAGACATCGCTGTC | 661 |
| 150 | AGTGCAGCAGACATCGCTGT | 660 |
| 151 | GAGTGCAGCAGACATCGCTG | 659 |
| 152 | GGAGTGCAGCAGACATCGCT | 658 |
| 153 | TGGAGTGCAGCAGACATCGC | 657 |
| 154 | ATGGAGTGCAGCAGACATCG | 656 |
| 155 | GAGCGCACGCCCTCTTAGGCG | 77 |
| 156 | AGCGCACGCCCTCTTAGGCG | 78 |
| 157 | GCGCACGCCCTCTTAGGCGG | 79 |
| 158 | CGCACGCCCTCTTAGGCGGT | 80 |
| 159 | GCACGCCCTCTTAGGCGGTC | 81 |
| 160 | CACGCCCTCTTAGGCGGTCC | 82 |
| 161 | ACGCCCTCTTAGGCGGTCCA | 83 |
| 162 | CGCCCTCTTAGGCGGTCCAC | 84 |
| 163 | GCCCTCTTAGGCGGTCCACC | 85 |
| 164 | CCCTCTTAGGCGGTCCACCC | 86 |
| 165 | CCTCTTAGGCGGTCCACCCC | 87 |
| 166 | CTCTTAGGCGGTCCACCCCC | 88 |
| 167 | TCTTAGGCGGTCCACCCCCC | 89 |
| 168 | CTTAGGCGGTCCACCCCCCG | 90 |
| 169 | TTAGGCGGTCCACCCCCCGC | 91 |
| 170 | TAGGCGGTCCACCCCCCGCG | 92 |
| 171 | AGGCGGTCCACCCCCCGCGG | 93 |
| 172 | GGCGGTCCACCCCCCGCGGC | 94 |
| 173 | GCGGTCCACCCCCCGCGGCC | 95 |
| 174 | CGGTCCACCCCCCGCGGCCT | 96 |
| 175 | GGTCCACCCCCCGCGGCCTT | 97 |
| 176 | GTCCACCCCCCGCGGCCTTC | 98 |
| 177 | TCCACCCCCCGCGGCCTTCT | 99 |
| 178 | CCACCCCCCGCGGCCTTCTG | 100 |
| 179 | CACCCCCCGCGGCCTTCTGG | 101 |
| 180 | ACCCCCCGCGGCCTTCTGGG | 102 |
| 181 | CCCCCCGCGGCCTTCTGGGA | 103 |
| 182 | CCCCCGCGGCCTTCTGGGAG | 104 |
| 183 | CCCCGCGGCCTTCTGGGAGT | 105 |
| 184 | CCCGCGGCCTTCTGGGAGTA | 106 |
| 185 | CCGCGGCCTTCTGGGAGTAG | 107 |
| 186 | CGCGGCCTTCTGGGAGTAGA | 108 |
| 187 | GCGGCCTTCTGGGAGTAGAG | 109 |
| 188 | CGGCCTTCTGGGAGTAGAGG | 110 |
| 189 | GGAGCGCACGCCCTCTTAGG | 76 |
| 190 | GGGAGCGCACGCCCTCTTAG | 75 |
| 191 | CGGGAGCGCACGCCCTCTTA | 74 |
| 192 | TCGGGAGCGCACGCCCTCTT | 73 |
| 193 | GTCGGGAGCGCACGCCCTCT | 72 |
| 194 | TGTCGGGAGCGCACGCCCTC | 71 |
| 195 | ATGTCGGGAGCGCACGCCCT | 70 |
| 196 | CATGTCGGGAGCGCACGCCC | 69 |
| 197 | GCATGTCGGGAGCGCACGCC | 68 |
| 198 | GGCATGTCGGGAGCGCACGC | 67 |
| 199 | GGGCATGTCGGGAGCGCACG | 66 |
| 200 | GGGGCATGTCGGGAGCGCAC | 65 |
| 201 | CGGGGCATGTCGGGAGCGCA | 64 |
| 202 | GCGGGGCATGTCGGGAGCGC | 63 |
| 203 | CGCGGGGCATGTCGGGAGCG | 62 |
| 204 | CCGCGGGGCATGTCGGGAGC | 61 |
| 205 | GCCGCGGGGCATGTCGGGAG | 60 |
| 206 | CGCCGCGGGGCATGTCGGGA | 59 |
| 207 | GCGCCGCGGGGCATGTCGGG | 58 |
| 208 | CGCGCCGCGGGGCATGTCGG | 57 |
| 209 | GCGCGCCGCGGGGCATGTCG | 56 |
| 210 | GGCGCGCCGCGGGGCATGTC | 55 |
| 211 | TGGCGCGCCGCGGGGCATGT | 54 |
| 212 | ATGGCGCGCCGCGGGGCATG | 53 |
| 213 | AATGGCGCGCCGCGGGGCAT | 52 |
| 214 | TAATGGCGCGCCGCGGGGCA | 51 |
| 215 | TTAATGGCGCGCCGCGGGGC | 50 |
| 216 | GTTAATGGCGCGCCGCGGGG | 49 |
| 217 | GGTTAATGGCGCGCCGCGGG | 48 |
| 218 | CGGTTAATGGCGCGCCGCGG | 47 |
| 219 | GCGGTTAATGGCGCGCCGCG | 46 |
| 220 | GGCGGTTAATGGCGCGCCGC | 45 |
| 221 | TGGCGGTTAATGGCGCGCCG | 44 |
| 222 | CTGGCGGTTAATGGCGCGCC | 43 |
| 223 | TCTGGCGGTTAATGGCGCGC | 42 |
| 224 | ATCTGGCGGTTAATGGCGCG | 41 |
| 225 | AATCTGGCGGTTAATGGCGC | 40 |
| 226 | AAATCTGGCGGTTAATGGCG | 39 |
| 227 | CAAATCTGGCGGTTAATGGC | 38 |
| 228 | TCAAATCTGGCGGTTAATGG | 37 |
| 229 | GAGCGCACGCCCTCTTAGGCGGTCCA | 77 |
| 230 | AGCGCACGCCCTCTTAGGCG | 78 |
| 231 | GCGCACGCCCTCTTAGGCGG | 79 |
| 232 | CGCACGCCCTCTTAGGCGGT | 80 |
| 233 | GCACGCCCTCTTAGGCGGTC | 81 |
| 234 | CACGCCCTCTTAGGCGGTCC | 82 |
| 235 | ACGCCCTCTTAGGCGGTCCA | 83 |
| 236 | CGCCCTCTTAGGCGGTCCAC | 84 |
| 237 | GCCCTCTTAGGCGGTCCACC | 85 |
| 238 | CCCTCTTAGGCGGTCCACCC | 86 |
| 239 | CCTCTTAGGCGGTCCACCCC | 87 |
| 240 | CTCTTAGGCGGTCCACCCCC | 88 |
| 241 | TCTTAGGCGGTCCACCCCCC | 89 |
| 242 | CTTAGGCGGTCCACCCCCCG | 90 |
| 243 | TTAGGCGGTCCACCCCCCGC | 91 |
| 244 | TAGGCGGTCCACCCCCCGCG | 92 |
| 245 | AGGCGGTCCACCCCCCGCGG | 93 |
| 246 | GGCGGTCCACCCCCCGCGGC | 94 |
| 247 | GCGGTCCACCCCCCGCGGCC | 95 |
| 248 | CGGTCCACCCCCCGCGGCCT | 96 |
| 249 | GGTCCACCCCCCGCGGCCTT | 97 |
| 250 | GTCCACCCCCCGCGGCCTTC | 98 |
| 251 | TCCACCCCCCGCGGCCTTCT | 99 |
| 252 | CCACCCCCCGCGGCCTTCTG | 100 |
| 253 | CACCCCCCGCGGCCTTCTGG | 101 |
| 254 | ACCCCCCGCGGCCTTCTGGG | 102 |
| 255 | CCCCCCGCGGCCTTCTGGGA | 103 |
| 256 | CCCCCGCGGCCTTCTGGGAG | 104 |
| 257 | CCCCGCGGCCTTCTGGGAGT | 105 |
| 258 | CCCGCGGCCTTCTGGGAGTA | 106 |
| 259 | CCGCGGCCTTCTGGGAGTAG | 107 |
| 260 | CGCGGCCTTCTGGGAGTAGA | 108 |
| 261 | GCGGCCTTCTGGGAGTAGAG | 109 |
| 262 | CGGCCTTCTGGGAGTAGAGG | 110 |
| 263 | GGAGCGCACGCCCTCTTAGG | 76 |
| 264 | GGGAGCGCACGCCCTCTTAG | 75 |
| 265 | CGGGAGCGCACGCCCTCTTA | 74 |
| 266 | TCGGGAGCGCACGCCCTCTT | 73 |
| 267 | GTCGGGAGCGCACGCCCTCT | 72 |
| 268 | TGTCGGGAGCGCACGCCCTC | 71 |
| 269 | ATGTCGGGAGCGCACGCCCT | 70 |
| 270 | CATGTCGGGAGCGCACGCCC | 69 |
| 271 | GCATGTCGGGAGCGCACGCC | 68 |
| 272 | GGCATGTCGGGAGCGCACGC | 67 |
| 273 | GGGCATGTCGGGAGCGCACG | 66 |
| 274 | GGGGCATGTCGGGAGCGCAC | 65 |
| 275 | CGGGGCATGTCGGGAGCGCA | 64 |
| 276 | GCGGGGCATGTCGGGAGCGC | 63 |
| 277 | CGCGGGGCATGTCGGGAGCG | 62 |
| 278 | CCGCGGGGCATGTCGGGAGC | 61 |
| 279 | GCCGCGGGGCATGTCGGGAG | 60 |
| 280 | CGCCGCGGGGCATGTCGGGA | 59 |
| 281 | GCGCCGCGGGGCATGTCGGG | 58 |
| 282 | CGCGCCGCGGGGCATGTCGG | 57 |
| 283 | GCGCGCCGCGGGGCATGTCG | 56 |
| 284 | GGCGCGCCGCGGGGCATGTC | 55 |
| 285 | TGGCGCGCCGCGGGGCATGT | 54 |
| 286 | ATGGCGCGCCGCGGGGCATG | 53 |
| 287 | AATGGCGCGCCGCGGGGCAT | 52 |
| 288 | TAATGGCGCGCCGCGGGGCA | 51 |
| 289 | TTAATGGCGCGCCGCGGGGC | 50 |
| 290 | GTTAATGGCGCGCCGCGGGG | 49 |
| 291 | GGTTAATGGCGCGCCGCGGG | 48 |
| 292 | CGGTTAATGGCGCGCCGCGG | 47 |
| 293 | GCGGTTAATGGCGCGCCGCG | 46 |
| 294 | GGCGGTTAATGGCGCGCCGC | 45 |
| 295 | TGGCGGTTAATGGCGCGCCG | 44 |
| 296 | CTGGCGGTTAATGGCGCGCC | 43 |
| 297 | TCTGGCGGTTAATGGCGCGC | 42 |
| 298 | ATCTGGCGGTTAATGGCGCG | 41 |
| 299 | AATCTGGCGGTTAATGGCGC | 40 |
| 300 | AAATCTGGCGGTTAATGGCG | 39 |
| 301 | CAAATCTGGCGGTTAATGGC | 38 |
| 302 | TCAAATCTGGCGGTTAATGG | 37 |
| 303 | GTCGCCCCTGGGTCCTGCTGATTGGC | 1919 |
| 304 | TCGCCCCTGGGTCCTGCTGA | 1920 |
| 305 | CGCCCCTGGGTCCTGCTGAT | 1921 |
| 306 | GGTCGCCCCTGGGTCCTGCT | 1918 |
| 307 | AGGTCGCCCCTGGGTCCTGC | 1917 |
| 308 | CAGGTCGCCCCTGGGTCCTG | 1916 |
| 309 | GCAGGTCGCCCCTGGGTCCT | 1915 |
| 310 | GGCAGGTCGCCCCTGGGTCC | 1914 |
| 311 | TGGCAGGTCGCCCCTGGGTC | 1913 |
| 312 | TTGGCAGGTCGCCCCTGGGT | 1912 |
| 313 | TTTGGCAGGTCGCCCCTGGG | 1911 |
| 314 | CTTTGGCAGGTCGCCCCTGG | 1910 |
| 315 | ACTTTGGCAGGTCGCCCCTG | 1909 |
| 316 | GACTTTGGCAGGTCGCCCCT | 1908 |
| 317 | TGACTTTGGCAGGTCGCCCC | 1907 |
| 318 | TTGACTTTGGCAGGTCGCCC | 1906 |
| 319 | GTTGACTTTGGCAGGTCGCC | 1905 |
| 320 | AGTTGACTTTGGCAGGTCGC | 1904 |
| 321 | CAGTTGACTTTGGCAGGTCG | 1903 |
| 322 | CAGCGAGCCTGGGCCCCATCGGCACATCT | 2909 |
| 323 | AGCGAGCCTGGGCCCCATCG | 2910 |
| 324 | GCGAGCCTGGGCCCCATCGG | 2911 |
| 325 | CGAGCCTGGGCCCCATCGGC | 2912 |
| 326 | GAGCCTGGGCCCCATCGGCA | 2913 |
| 327 | AGCCTGGGCCCCATCGGCAC | 2914 |
| 328 | GCCTGGGCCCCATCGGCACA | 2915 |
| 329 | CCTGGGCCCCATCGGCACAT | 2916 |
| 330 | CTGGGCCCCATCGGCACATC | 2917 |
| 331 | TGGGCCCCATCGGCACATCT | 2918 |
| 332 | GGGCCCCATCGGCACATCTG | 2919 |
| 333 | GGCCCCATCGGCACATCTGA | 2920 |
| 334 | GCCCCATCGGCACATCTGAA | 2921 |
| 335 | CCCCATCGGCACATCTGAAG | 2922 |
| 336 | CCCATCGGCACATCTGAAGG | 2923 |
| 337 | CCATCGGCACATCTGAAGGT | 2924 |
| 338 | CATCGGCACATCTGAAGGTG | 2925 |
| 339 | ATCGGCACATCTGAAGGTGC | 2926 |
| 340 | TCGGCACATCTGAAGGTGCA | 2927 |
| 341 | CGGCACATCTGAAGGTGCAC | 2928 |
| 342 | GCAGCGAGCCTGGGCCCCAT | 2908 |
| 343 | TGCAGCGAGCCTGGGCCCCA | 2907 |
| 344 | CTGCAGCGAGCCTGGGCCCC | 2906 |
| 345 | TCTGCAGCGAGCCTGGGCCC | 2905 |
| 346 | ATCTGCAGCGAGCCTGGGCC | 2904 |
| 347 | CATCTGCAGCGAGCCTGGGC | 2903 |
| 348 | CCATCTGCAGCGAGCCTGGG | 2902 |
| 349 | GCCATCTGCAGCGAGCCTGG | 2901 |
| 350 | GGCCATCTGCAGCGAGCCTG | 2900 |
| 351 | GGGCCATCTGCAGCGAGCCT | 2899 |
| 352 | GGGGCCATCTGCAGCGAGCC | 2898 |
| 353 | GGGGGCCATCTGCAGCGAGC | 2897 |
| 354 | AGGGGGCCATCTGCAGCGAG | 2896 |
| 355 | AAGGGGGCCATCTGCAGCGA | 2895 |
| 356 | GAAGGGGGCCATCTGCAGCG | 2894 |
| 357 | CCCGCGGCCTTCTGGGAGTAGAGGC | 106 |
| 358 | CCGCGGCCTTCTGGGAGTAG | 107 |
| 359 | CGCGGCCTTCTGGGAGTAGA | 108 |
| 360 | GCGGCCTTCTGGGAGTAGAG | 109 |
| 361 | CGGCCTTCTGGGAGTAGAGG | 110 |
| 362 | CCCCGCGGCCTTCTGGGAGT | 105 |
| 363 | CCCCCGCGGCCTTCTGGGAG | 104 |
| 364 | CCCCCCGCGGCCTTCTGGGA | 103 |
| 365 | ACCCCCCGCGGCCTTCTGGG | 102 |
| 366 | CACCCCCCGCGGCCTTCTGG | 101 |
| 367 | CCACCCCCCGCGGCCTTCTG | 100 |
| 368 | TCCACCCCCCGCGGCCTTCT | 99 |
| 369 | GTCCACCCCCCGCGGCCTTC | 98 |
| 370 | GGTCCACCCCCCGCGGCCTT | 97 |
| 371 | CGGTCCACCCCCCGCGGCCT | 96 |
| 372 | GCGGTCCACCCCCCGCGGCC | 95 |
| 373 | GGCGGTCCACCCCCCGCGGC | 94 |
| 374 | AGGCGGTCCACCCCCCGCGG | 93 |
| 375 | TAGGCGGTCCACCCCCCGCG | 92 |
| 376 | TTAGGCGGTCCACCCCCCGC | 91 |
| 377 | CTTAGGCGGTCCACCCCCCG | 90 |
| 378 | TCTTAGGCGGTCCACCCCCC | 89 |
| 379 | CTCTTAGGCGGTCCACCCCC | 88 |
| 380 | CCTCTTAGGCGGTCCACCCC | 87 |
| 381 | CCCTCTTAGGCGGTCCACCC | 86 |
| 382 | GCCCTCTTAGGCGGTCCACC | 85 |
| 383 | CGCCCTCTTAGGCGGTCCAC | 84 |
| 384 | ACGCCCTCTTAGGCGGTCCA | 83 |
| 385 | CACGCCCTCTTAGGCGGTCC | 82 |
| 386 | GCACGCCCTCTTAGGCGGTC | 81 |
| 387 | CGCACGCCCTCTTAGGCGGT | 80 |
| 388 | GCGCACGCCCTCTTAGGCGG | 79 |
| 389 | AGCGCACGCCCTCTTAGGCG | 78 |
| 390 | GAGCGCACGCCCTCTTAGGC | 77 |
| 391 | GGAGCGCACGCCCTCTTAGG | 76 |
| 392 | GGGAGCGCACGCCCTCTTAG | 75 |
| 393 | CGGGAGCGCACGCCCTCTTA | 74 |
| 394 | TCGGGAGCGCACGCCCTCTT | 73 |
| 395 | GTCGGGAGCGCACGCCCTCT | 72 |
| 396 | TGTCGGGAGCGCACGCCCTC | 71 |
| 397 | ATGTCGGGAGCGCACGCCCT | 70 |
| 398 | CATGTCGGGAGCGCACGCCC | 69 |
| 399 | GCATGTCGGGAGCGCACGCC | 68 |
| 400 | GGCATGTCGGGAGCGCACGC | 67 |
| 401 | GGGCATGTCGGGAGCGCACG | 66 |
| 402 | GGGGCATGTCGGGAGCGCAC | 65 |
| 403 | CGGGGCATGTCGGGAGCGCA | 64 |
| 404 | GCGGGGCATGTCGGGAGCGC | 63 |
| 405 | CGCGGGGCATGTCGGGAGCG | 62 |
| 406 | CCGCGGGGCATGTCGGGAGC | 61 |
| 407 | GCCGCGGGGCATGTCGGGAG | 60 |
| 408 | CGCCGCGGGGCATGTCGGGA | 59 |
| 409 | GCGCCGCGGGGCATGTCGGG | 58 |
| 410 | CGCGCCGCGGGGCATGTCGG | 57 |
| 411 | GCGCGCCGCGGGGCATGTCG | 56 |
| 412 | GGCGCGCCGCGGGGCATGTC | 55 |
| 413 | TGGCGCGCCGCGGGGCATGT | 54 |
| 414 | ATGGCGCGCCGCGGGGCATG | 53 |
| 415 | AATGGCGCGCCGCGGGGCAT | 52 |
| 416 | TAATGGCGCGCCGCGGGGCA | 51 |
| 417 | TTAATGGCGCGCCGCGGGGC | 50 |
| 418 | GTTAATGGCGCGCCGCGGGG | 49 |
| 419 | GGTTAATGGCGCGCCGCGGG | 48 |
| 420 | CGGTTAATGGCGCGCCGCGG | 47 |
| 421 | GCGGTTAATGGCGCGCCGCG | 46 |
| 422 | GGCGGTTAATGGCGCGCCGC | 45 |
| 423 | TGGCGGTTAATGGCGCGCCG | 44 |
| 424 | CTGGCGGTTAATGGCGCGCC | 43 |
| 425 | TCTGGCGGTTAATGGCGCGC | 42 |
| 426 | ATCTGGCGGTTAATGGCGCG | 41 |
| 427 | AATCTGGCGGTTAATGGCGC | 40 |
| 428 | AAATCTGGCGGTTAATGGCG | 39 |
| 429 | CAAATCTGGCGGTTAATGGC | 38 |
| 430 | TCAAATCTGGCGGTTAATGG | 37 |
| 431 | TCCCGGCGAGTACATCGTTGACTGCACG | 679 |
| 432 | CCCGGCGAGTACATCGTTGA | 680 |
| 433 | CCGGCGAGTACATCGTTGAC | 681 |
| 434 | CGGCGAGTACATCGTTGACT | 682 |
| 435 | GGCGAGTACATCGTTGACTG | 683 |
| 436 | GCGAGTACATCGTTGACTGC | 684 |
| 437 | CGAGTACATCGTTGACTGCA | 685 |
| 438 | GAGTACATCGTTGACTGCAC | 686 |
| 439 | AGTACATCGTTGACTGCACG | 687 |
| 440 | GTACATCGTTGACTGCACGA | 688 |
| 441 | TACATCGTTGACTGCACGAC | 689 |
| 442 | ACATCGTTGACTGCACGACC | 690 |
| 443 | CATCGTTGACTGCACGACCT | 691 |
| 444 | ATCGTTGACTGCACGACCTG | 692 |
| 445 | TCGTTGACTGCACGACCTGG | 693 |
| 446 | CGTTGACTGCACGACCTGGG | 694 |
| 447 | GTTGACTGCACGACCTGGGT | 695 |
| 448 | TTGACTGCACGACCTGGGTT | 696 |
| 449 | TGACTGCACGACCTGGGTTT | 697 |
| 450 | GACTGCACGACCTGGGTTTC | 698 |
| 451 | ACTGCACGACCTGGGTTTCC | 699 |
| 452 | CTGCACGACCTGGGTTTCCA | 700 |
| 453 | TGCACGACCTGGGTTTCCAG | 701 |
| 454 | GCACGACCTGGGTTTCCAGG | 702 |
| 455 | CACGACCTGGGTTTCCAGGA | 703 |
| 456 | ACGACCTGGGTTTCCAGGAG | 704 |
| 457 | CGACCTGGGTTTCCAGGAGG | 705 |
| 458 | GTCCCGGCGAGTACATCGTT | 678 |
| 459 | TGTCCCGGCGAGTACATCGT | 677 |
| 460 | CTGTCCCGGCGAGTACATCG | 676 |
| 461 | GCTGTCCCGGCGAGTACATC | 675 |
| 462 | CGCTGTCCCGGCGAGTACAT | 674 |
| 463 | TCGCTGTCCCGGCGAGTACA | 673 |
| 464 | ATCGCTGTCCCGGCGAGTAC | 672 |
| 465 | CATCGCTGTCCCGGCGAGTA | 671 |
| 466 | ACATCGCTGTCCCGGCGAGT | 670 |
| 467 | GACATCGCTGTCCCGGCGAG | 669 |
| 468 | AGACATCGCTGTCCCGGCGA | 668 |
| 469 | CAGACATCGCTGTCCCGGCG | 667 |
| 470 | GCAGACATCGCTGTCCCGGC | 666 |
| 471 | AGCAGACATCGCTGTCCCGG | 665 |
| 472 | CAGCAGACATCGCTGTCCCG | 664 |
| 473 | GCAGCAGACATCGCTGTCCC | 663 |
| 474 | TGCAGCAGACATCGCTGTCC | 662 |
| 475 | GTGCAGCAGACATCGCTGTC | 661 |
| 476 | AGTGCAGCAGACATCGCTGT | 660 |
| 477 | GAGTGCAGCAGACATCGCTG | 659 |
| 478 | GGAGTGCAGCAGACATCGCT | 658 |
| 479 | TGGAGTGCAGCAGACATCGC | 657 |
| 480 | ATGGAGTGCAGCAGACATCG | 656 |
| 481 | AACCTCCTCCCCGCCACGGGTT | 1233 |
| 482 | ACCTCCTCCCCGCCACGGGT | 1234 |
| 483 | CCTCCTCCCCGCCACGGGTT | 1235 |
| 484 | CTCCTCCCCGCCACGGGTTC | 1236 |
| 485 | TCCTCCCCGCCACGGGTTCA | 1237 |
| 486 | CCTCCCCGCCACGGGTTCAA | 1238 |
| 487 | CTCCCCGCCACGGGTTCAAG | 1239 |
| 488 | TCCCCGCCACGGGTTCAAGC | 1240 |
| 489 | CCCCGCCACGGGTTCAAGCG | 1241 |
| 490 | CCCGCCACGGGTTCAAGCGA | 1242 |
| 491 | CCGCCACGGGTTCAAGCGAT | 1243 |
| 492 | CGCCACGGGTTCAAGCGATT | 1244 |
| 493 | GCCACGGGTTCAAGCGATTC | 1245 |
| 494 | CCACGGGTTCAAGCGATTCT | 1246 |
| 495 | CACGGGTTCAAGCGATTCTC | 1247 |
| 496 | ACGGGTTCAAGCGATTCTCC | 1248 |
| 497 | CGGGTTCAAGCGATTCTCCT | 1249 |
| 498 | GGGTTCAAGCGATTCTCCTG | 1250 |
| 499 | GGTTCAAGCGATTCTCCTGC | 1251 |
| 500 | GTTCAAGCGATTCTCCTGCC | 1252 |
| 501 | TTCAAGCGATTCTCCTGCCT | 1253 |
| 502 | TCAAGCGATTCTCCTGCCTC | 1254 |
| 503 | CAAGCGATTCTCCTGCCTCA | 1255 |
| 504 | AAGCGATTCTCCTGCCTCAG | 1256 |
| 505 | AGCGATTCTCCTGCCTCAGC | 1257 |
| 506 | GCGATTCTCCTGCCTCAGCC | 1258 |
| 507 | CGATTCTCCTGCCTCAGCCT | 1259 |
| 508 | CAACCTCCTCCCCGCCACGG | 1232 |
| 509 | GCAACCTCCTCCCCGCCACG | 1231 |
| 510 | TGCAACCTCCTCCCCGCCAC | 1230 |
| 511 | CTGCAACCTCCTCCCCGCCA | 1229 |
| 512 | ACTGCAACCTCCTCCCCGCC | 1228 |
| 513 | CACTGCAACCTCCTCCCCGC | 1227 |
| 514 | TCACTGCAACCTCCTCCCCG | 1226 |

Hot Zones (Relative upstream location to gene start site)
1-350
600-800
1100-1350
1900-2150
2750-3200

### Examples

[0291] In FIG. 1, SU1 (1) shows a dose-dependent response in MDA-MB-231, a human breast cell line, with SU1 at 20 μL showing greater inhibition than SU1 at 10 and 3 μM. SU1's inhibition values, both at 20 and 10 μM, were statistically significant (P<0.05) compared to untreated control values. SU1's inhibition values at 3 μM were insignificant (insignificance indicated by bars with diagonal stripes). Furthermore, SU3's (3) inhibition values at 10 μM were insignificant compared to the untreated control values. SU3's diminished inhibition is attributable to the lack of a CG pair in the 5′ linear section before or at the base of the hairpin of the secondary structure and further back from the transcription start site compared to the other oligonucleotides tested. Two variants of SU1, SU1_{—}02 (4; 1 base shorter) and SU1_{—}03 (5; 4 bases longer), were also statistically significant at 10 μM (P<0.5) compared to the untreated control. This demonstrates that a sequence still retains its inhibitory levels despite shifting the sequence a few bases. The negative control (a scrambled oligonucleotide) was not statistically significant compared to the untreated control. The Survivin sequences SU1 (1), SU1_{—}02 (4), SU1_{—}03 (5) (shown below) fit the independent and dependent DNAi motif claims. As noted previously, SU3 (3), does not contain a CG in the 5′ linear section either prior to or in the base of the hairpin.

[0292] FIG. 2 is similar to FIG. 1 and in FIG. 2 it is shown that SU1 (1) demonstrated significant (P<0.05) inhibition of A549 (human lung cell line) compared to the untreated control values. Also, SU3's (3) inhibition values were insignificant compared to the untreated control values. The negative control was not statistically significant compared to the untreated control. The Survivin sequence SU1 (1) (shown below) fits the independent and dependent DNAi motif claims. As noted previously, SU3 (3), does not contain a CG in the 5′ linear section either prior to or in the base of the hairpin.

[0293] FIG. 3 shows that DU145 (human prostate cell line), SU1 (1) and its two variants, SU1_{—}02 (4) and SU1_{—}03 (5), produced statistically significant (P<0.05) inhibition at 10 μM compared to the untreated control values. SU2 (2), at 20 μM, produced statistically significant (P<0.05) inhibition compared to the untreated control values. The Survivin sequences SU1 (1), SU1_{—}02 (4), SU1_{—}03 (5), and SU2 (2) (shown below) fit the independent and dependent DNAi motif claims. As noted previously, SU3 (3), does not contain a CG in the 5′ linear section either prior to or in the base of the hairpin. SU2 (2) demonstrates that some oligonucleotides will show inhibition at acceptably higher concentrations (below a concentration where general cytotoxicity is observed) even though they may not demonstrate inhibition at lower concentrations.

[0294] FIG. 4 shows that in MCF7 (human mammary breast cell line), SU1 (1) produced statistically significant (P<0.05) inhibition at 10 μM compared to the untreated and negative control values. The Survivin sequence SU1 (1), fits the independent and dependent DNAi motif claims.

[0295] Secondary Structures FIGS. 5, 6, 7, 8, 9.

[0296] FIG. 5 is Sequence 1 (SU1). FIG. 6 is Sequence 2 (SU2). FIG. 7 is Sequence 3 (SU3) (Note in FIG. 7 or Sequence 3 there is No CG in the 5′ linear base. FIG. 8 is Sequence 4 (SU1_{—}02). FIG. 9 is Sequence 5 (SU1_{—}03).

Genetic Code (5′ Upstream Region)

(SEQ ID NO: 11950)

ATCATGACACACATTTACCTGTGTAACAAACCTGCACATCCTACACA
TATACCCTGGAACTTAAAGTAAAAGTTGGGGGGGGGGGTAAAAAAGAATT
TCCACCGTGACATTATTGAGTATAGCAAAAAAAAAAAAAACAAGAAACAG
CCTAGTGTTCATTAGGGAATAAACGCATTCAAGCAGCATCAAACCCTGCA
GCCATTACAAAGAGATCTATGTTGACCATGTGGAATATCTCCAAGAGCCA
CAGTAGCCTCCCTTATCTGTAGGATTCACTCCAAGACCCTCTGAAACCAT
GGATAATACTGAACCCTATATACACTATGTTTTTTCTTGTATATACATAC
CTACGATAAAGTTTAATTTATAAATTGGCAAAGGGTATATAAATATTCCT
TCTAAGAGATTAACAATAACTAATAAAGTAGAACGATTAAAACAATATAC
TGTGATCAAAGTTATGTGAAGCCAGGTGCTGTGGCTCATGCCTGTAATCC
CAGCACTTTGGGAGGCTGAGACAGGTGGATCACCTGAGGTCAGGAGTTGG
AGACCAGCCTGGCCAACATGACAAAACCCCGTCTCTACTAAAGATAAAAA
AAATTAGCCGGGCATGGTGACACATGCCTGTAATCCCAGCTACTTGGGAG
GCTGAGGCAGGAGAATCGCTTGAACCTGGGAGGCGGAGGTTGCAGTGAGC
TAAGATCACACCATTGCACTCCAGCCTGGGCAACAAGAGTGAAACTCTGT
CTCAAAACAAAACAAAACAAAACAAACTTATGGGGTTGCTCTCTTTCTCT
CAAAATATCCTTTTTTTGGCAGGGCACGGTGGCTCATGCCTGTAATCCCA
GCACTTTGAGAGGCTGAGGTGGGTGAATCACCTGAGGTCAGGAGTTCAAG
ACCAGCCTGGCCAACATGGTGAAACCCCGTCTCTATTAAAAATACAAAAA
ATTAGCTGGGCGTGGTGGTGCAGGCCTGTAATCCCAGCTACTTGGGAGGC
TGAGGCAGGAGAATCACTCGAACCCAGGAGCTGGAGTTTGCAGTGAGCCG
AGATCATGCCATTGCACTCCAGCCTGGGCCACAGAGCAAGACTCCATCTC
AAAAAAAAAAAAAAGAAAAAAAGAAAGTCTTTTTTTTTTTTGAGACTGTA
TCTCACTCTTTCTCCCAGGCTGGAGTGCAGTGGCCCAATCATGGCTCACT
GCAGCCTCGACCTCCCAGGATCAAGTGATCCTTCCACCTCAGCCTCCCGA
GTAGCTGGAAGTATAGGTGCACGCCCGACTGATTTTTTTTTTTTTTTTTA
GACGGAGTCTCACTCTTGTTGCTCTGGCTGGAGTGCAATGGCAGGATCTC
GGCTCACTGCAACCTCTGCCTCTTAGATTCAAGCGATTCTCGTGCCTCAG
CCTCCCGAGTAGCTGGGATTACAGGTGCCCACCACCATGCCCGGATAATT
TTTTGTATTTTTAATAGAGACAGGGTTTCACCATATTGGTCAGGCTGGTC
TCAAACTCCTGACCTCAGGTGATCCACCTGCCTCAGCCTCCCAAACTGCT
GGGATTACAGGCGTGAGCCACCGGGCATGGCCTTTCCTGGCTAATTTTTT
AAATTTTTGATAGAGATGGGGTCTCAGTGTTGCCCAGGCTGATCTTGAAC
TCCTAGATTCAAGTGATCCTCCCTCCTTGGTCTCCCAAAGTGCTGAGATT
ACAGGCGTGAGCCACCGCCCCGGGCTGGAAAATACTTTTTTAAACGAGGG
CAATGTGAATCTGAAATGCCATTTGAGGAAAGATCTGTTCGCCTGACATC
CTGTTTGAGCCTGGGTGGACAGGACAGCACCTGCCAGCATCGGGAAGCAC
TGCAGATGGGAAGAGGCTTGGTCACTCTCCAAAGGTGGCAGGAGTTGGAG
GGGGTGAGCTGAAGGTAAGGAGAAAGGAGGTGGGGACCCAGGAGACAGGG
GCTGCGCAGCGGGCTCGGGGCTGACACCCCCACGGATACAGTTCACTGGG
GCTCAAACATAAAAGGAACCCAACTATTGTGGGAGGAAAAGACTCTTCTG
CCTTTCTGCCTTTTCTTTTTTTCTTTTTCTTTCTTTCTTTTTTTTTTTTT
TTTTTTGAGACAGAGTCTTGCTCTATCGCCCAGGCTGGAGTGCAGTGGCG
TGATCTCGGCTCACTGCAAGCTCTGCCTCCCGGGATCACGCCATTCTCCT
GCCTCAACCTCCCGAGCAGCTGGGACTACAGGCGCCTGCCACCACACCCG
GCTATTTTTTTGTATTTTTTAGTAGAGATGGGGTTTCACCGTGTTAGCCA
GGACGGTCTCGATCTCCTGACCTTGTGATCCGCCCGCCTCGGCCTCCCAA
AGTGCTGGGATTACAGGCGTGAGCCACCGCGCCTGGCTCTTTTTTCTTTC
TTTTTTTTTTTTCCGAGACAGAGTTTCACTCTTGTTGCCCAGGCTGGAGT
GCAGTGGCGCAATCTTGGCTCACTGCAACCTCCACCTCCAGGGTTCAAGC
GATTCTCCTGCCTCAGCCTCCTGAGTAGCTGGGACTGCAGGCGCGCACCA
CCACGCCTGGCTAATTTTTGTATTTTTAGTAGAGACAGGGTTTCACCATA
TTGGCCAGGCTGGTCTCGAACTCCTGACCTTGTGATCTGCCCACCTCAGC
CTCCCAAAGTCCTGGGATTACAGGCGTGAGCCACCGTGCCCAGCCTGACC
CCTCTGCCCTTTCAAAAACTATGTTCGTTCTCTCACAGCCTTCTCTTGTC
ATATTAAGTCCACACCGCAGGCCTAATTTGTCCAGTGAATGCTATGCAAA
TATTTCATGCACCTGCTGATCGCAGGAATGATATGTACTTGGTACGCACT
GATCGTACCTCGGGGTGGGAGAAGAGAGGGCAAGGAAGCAAAGAATAGCC
CCCTCCTTTCCTGGTGCACCTTCAGATGTGCCGATGGGGCCCAGGCTCGC
TGCAGATGGCCCCCTTCCCAGAGACAGGGGAGGATCCTCCACCCACTCCC
CAGCCTCCAGGACCATCCTGACTCCTGCCTTCAGGCACTCAAGTTATGCG
TCTAGACATGCGGATATATTCAAGCTGGGCACAGCACAGCAGCCCCACCC
CAGGCAGCTTGAAATCAGAGCTGGGGTCCAAAGGGACCACACCCCGAGGG
ACTGTGTGGGGGTCGGGGCACACAGGCCACTGCTTCCCCCCGTCTTTCTC
AGCCATTCCTGAAGTCAGCCTCACTCTGCTTCTCAGGGATTTCAAATGTG
CAGAGACTCTGGCACTTTTGTAGAAGCCCCTTCTGGTCCTAACTTACACC
TGGATGCTGTGGGGCTGCAGCTGCTGCTCGGGCTCGGGAGGATGCTGGGG
GCCCGGTGCCCATGAGCTTTTGAAGCTCCTGGAACTCGGTTTTGAGGGTG
TTCAGGTCCAGGTGGACACCTGGGCTGTCCTTGTCCATGCATTTGATGAC
ATTGTGTGCAGAAGTGAAAAGGAGTTAGGCCGGGCATGCTGGCTTATGCC
TGTAATCCCAGCACTTTGGGAGGCTGAGGCGGGTGGATCACGAGGTCAGG
AGTTCAATACCAGCCTGGCCAAGATGGTGAAACCCCGTCTCTACTAAAAA
TACAAAAAAATTAGCCGGGCATGGTGGCGGGCGCATGTAATCCCAGCTAC
TGGGGGGGCTGAGGCAGAGAATTGCTGGAACCCAGGAGATGGAGGTTGCA
GTGAGCCAAGATTGTGCCACTGCACTGCACTCCAGCCTGGCGACAGAGCA
AGACTCTGTCTCAAAAAAAAAAAAAAAAAGTGAAAAGGAGTTGTTCCTTT
CCTCCCTCCTGAGGGCAGGCAACTGCTGCGGTTGCCAGTGGAGGTGGTGC
GTCCTTGGTCTGTGCCTGGGGGCCACCCCAGCAGAGGCCATGGTGGTGCC
AGGGCCCGGTTAGCGAGCCAATCAGCAGGACCCAGGGGCGACCTGCCAAA
GTCAACTGGATTTGATAACTGCAGCGAAGTTAAGTTTCCTGATTTTGATG
ATTGTGTTGTGGTTGTGTAAGAGAATGAAGTATTTCGGGGTAGTATGGTA
ATGCCTTCAACTTACAAACGGTTCAGGTAAACCACCCATATACATACATA
TACATGCATGTGATATATACACATACAGGGATGTGTGTGTGTTCACATAT
ATGAGGGGAGAGAGACTAGGGGAGAGAAAGTAGGTTGGGGAGAGGGAGAG
AGAAAGGAAAACAGGAGACAGAGAGAGAGCGGGGAGTAGAGAGAGGGAAG
GGGTAAGAGAGGGAGAGGAGGAGAGAAAGGGAGGAAGAAGCAGAGAGTGA
ATGTTAAAGGAAACAGGCAAAACATAAACAGAAAATCTGGGTGAAGGGTA
TATGAGTATTCTTTGTACTATTCTTGCAATTATCTTTTATTTAAATTGAC
ATCGGGCCGGGCGCAGTGGCTCACATCTGTAATCCCAGCACTTTGGGAGG
CCGAGGCAGGCAGATCACTTGAGGTCAGGAGTTTGAGACCAGCCTGGCAA
ACATGGTGAAACCCCATCTCTACTAAAAATACAAAAATTAGCCTGGTGTG
GTGGTGCATGCCTTTAATCTCAGCTACTCGGGAGGCTGAGGCAGGAGAAT
CGCTTGAACCCGTGGCGGGGAGGAGGTTGCAGTGAGCTGAGATCATGCCA
CTGCACTCCAGCCTGGGCGATAGAGCGAGACTCAGTTTCAAATAAATAAA
TAAACATCAAAATAAAAAGTTACTGTATTAAAGAATGGGGGCGGGGTGGG
AGGGGTGGGGAGAGGTTGCAAAAATAAATAAATAAATAAATAAACCCCAA
AATGAAAAAGACAGTGGAGGCACCAGGCCTGCGTGGGGCTGGAGGGCTAA
TAAGGCCAGGCCTCTTATCTCTGGCCATAGAACCAGAGAAGTGAGTGGAT
GTGATGCCCAGCTCCAGAAGTGACTCCAGAACACCCTGTTCCAAAGCAGA
GGACACACTGATTTTTTTTTTAATAGGCTGCAGGACTTACTGTTGGTGGG
ACGCCCTGCTTTGCGAAGGGAAAGGAGGAGTTTGCCCTGAGCACAGGCCC
CCACCCTCCACTGGGCTTTCCCCAGCTCCCTTGTCTTCTTATCACGGTAG
TGGCCCAGTCCCTGGCCCCTGACTCCAGAAGGTGGCCCTCCTGGAAACCC
AGGTCGTGCAGTCAACGATGTACTCGCCGGGACAGCGATGTCTGCTGCAC
TCCATCCCTCCCCTGTTCATTTGTCCTTCATGCCCGTCTGGAGTAGATGC
TTTTTGCAGAGGTGGCACCCTGTAAAGCTCTCCTGTCTGACTTTTTTTTT
TTTTTTAGACTGAGTTTTGCTCTTGTTGCCTAGGCTGGAGTGCAATGGCA
CAATCTCAGCTCACTGCACCCTCTGCCTCCCGGGTTCAAGCGATTCTCCT
GCCTCAGCCTCCCGAGTAGTTGGGATTACAGGCATGCACCACCACGCCCA
GCTAATTTTTGTATTTTTAGTAGAGACAAGGTTTCACCGTGATGGCCAGG
CTGGTCTTGAACTCCAGGACTCAAGTGATGCTCCTGCCTAGGCCTCTCAA
AGTGTTGGGATTACAGGCGTGAGCCACTGCACCCGGCCTGCACGCGTTCT
TTGAAAGCAGTCGAGGGGGCGCTAGGTGTGGGCAGGGACGAGCTGGCGCG
GCGTCGCTGGGTGCACCGCGACCACGGGCAGAGCCACGCGGCGGGAGGAC
TACAACTCCCGGCACACCCCGCGCCGCCCCGCCTCTACTCCCAGAAGGCC
GCGGGGGGTGGACCGCCTAAGAGGGCGTGCGCTCCCGACATGCCCCGCGG
CGCGCCATTAACCGCCAGATTTGAATCGCGGGACCCGTTGGCAGAGGTGG
CGGCGGCGGCATG

[0297] 2) Beclin-1. Beclin 1, the mammalian orthologue of yeast Atg6, has a central role in autophagy, a process of programmed cell survival, which is increased during periods of cell stress and extinguished during the cell cycle. It interacts with several cofactors (Atg14L, UVRAG, Bif-1, Rubicon, Ambra1, HMGB1, nPIST, VMP1, SLAM, IP₃R, PINK and survivin) to regulate the lipid kinase Vps-34 protein and promote formation of Beclin 1-Vps34-Vps15 core complexes, thereby inducing autophagy. In contrast, the BH3 domain of Beclin 1 is bound to, and inhibited by Bcl-2 or Bcl-XL. This interaction can be disrupted by phosphorylation of Bcl-2 and Beclin 1, or ubiquitination of Beclin 1. Interestingly, caspase-mediated cleavage of Beclin 1 promotes crosstalk between apoptosis and autophagy. Beclin 1 dysfunction has been implicated in many disorders, including cancer and neurodegeneration (reviewed by Kang et al., Cell Death Differ. 2011 April; 18(4): 571-580).

[0298] Protein: Beclin-1 Gene: BECN1 (Homo sapiens, chromosome 17, 40962150-40976310 [NCBI Reference Sequence: NC_{—}000017.10]; start site location: 40975895; strand: negative)

Gene Identification

| | |
|---|---|
| GeneID | 8678 |
| HGNC | 1034 |
| HPRD | 05087 |
| MIM | 604378 |

Targeted Sequences

| | | | Relative |
|---|---|---|---|
| | | | upstream |
| | | | location |
| Se- | De- | | to gene |
| quence | sign | | start |
| ID No: | ID | Sequence (5′-3′) | site |
| 515 | BE1 | CGACGCCCTTGACCTCCGGCCCGGGGT | 39 |
| 550 | BE2 | CTGCGCCGTTCCCTCTAGGAATGG | 111 |
| 572 | | GAAGCGACGCCCTTGACCTCCGGCCCGG | 35 |
| 607 | | CCCCCGATGCTCTTCACCTCGGG | 261 |
| 712 | | CGGGTCGGCCCCGGAGCGAGGCC | 335 |
| 817 | | GCCCGGCAGCGGCCCCCAGAGGCCG | 475 |
| 847 | | CGGTCTACCGCGGAGGCACTGTGGCCTCGG | 308 |
| 952 | | ACAAAAACTAGCCGGGCGTGGTGGGGCACG | 735 |
| | | CC | |

Target Shift Sequences

| | | Relative |
|---|---|---|
| | | upstream |
| | | location |
| | | to gene |
| Sequence | | start |
| ID No: | Sequence (5′-3′) | site |
| 515 | CGACGCCCTTGACCTCCGGCCCGGGGT | 39 |
| 516 | GACGCCCTTGACCTCCGGCC | 40 |
| 517 | ACGCCCTTGACCTCCGGCCC | 41 |
| 518 | CGCCCTTGACCTCCGGCCCG | 42 |
| 519 | GCCCTTGACCTCCGGCCCGG | 43 |
| 520 | CCCTTGACCTCCGGCCCGGG | 44 |
| 521 | CCTTGACCTCCGGCCCGGGG | 45 |
| 522 | CTTGACCTCCGGCCCGGGGT | 46 |
| 523 | TTGACCTCCGGCCCGGGGTT | 47 |
| 524 | TGACCTCCGGCCCGGGGTTA | 48 |
| 525 | GACCTCCGGCCCGGGGTTAC | 49 |
| 526 | ACCTCCGGCCCGGGGTTACC | 50 |
| 527 | CCTCCGGCCCGGGGTTACCA | 51 |
| 528 | CTCCGGCCCGGGGTTACCAC | 52 |
| 529 | TCCGGCCCGGGGTTACCACA | 53 |
| 530 | CCGGCCCGGGGTTACCACAT | 54 |
| 531 | CGGCCCGGGGTTACCACATG | 55 |
| 532 | GGCCCGGGGTTACCACATGC | 56 |
| 533 | GCCCGGGGTTACCACATGCC | 57 |
| 534 | CCCGGGGTTACCACATGCCT | 58 |
| 535 | CCGGGGTTACCACATGCCTT | 59 |
| 536 | CGGGGTTACCACATGCCTTG | 60 |
| 537 | GCGACGCCCTTGACCTCCGG | 38 |
| 538 | AGCGACGCCCTTGACCTCCG | 37 |
| 539 | AAGCGACGCCCTTGACCTCC | 36 |
| 540 | GAAGCGACGCCCTTGACCTC | 35 |
| 541 | AGAAGCGACGCCCTTGACCT | 34 |
| 542 | GAGAAGCGACGCCCTTGACC | 33 |
| 543 | GGAGAAGCGACGCCCTTGAC | 32 |
| 544 | GGGAGAAGCGACGCCCTTGA | 31 |
| 545 | AGGGAGAAGCGACGCCCTTG | 30 |
| 546 | TAGGGAGAAGCGACGCCCTT | 29 |
| 547 | TTAGGGAGAAGCGACGCCCT | 28 |
| 548 | ATTAGGGAGAAGCGACGCCC | 27 |
| 549 | CATTAGGGAGAAGCGACGCC | 26 |
| 550 | CTGCGCCGTTCCCTCTAGGAATGG | 111 |
| 551 | TGCGCCGTTCCCTCTAGGAA | 112 |
| 552 | GCGCCGTTCCCTCTAGGAAT | 113 |
| 553 | CGCCGTTCCCTCTAGGAATG | 114 |
| 554 | GCCGTTCCCTCTAGGAATGG | 115 |
| 555 | CCGTTCCCTCTAGGAATGGT | 116 |
| 556 | CGTTCCCTCTAGGAATGGTA | 117 |
| 557 | CCTGCGCCGTTCCCTCTAGG | 110 |
| 558 | ACCTGCGCCGTTCCCTCTAG | 109 |
| 559 | AACCTGCGCCGTTCCCTCTA | 108 |
| 560 | CAACCTGCGCCGTTCCCTCT | 107 |
| 561 | CCAACCTGCGCCGTTCCCTC | 106 |
| 562 | CCCAACCTGCGCCGTTCCCT | 105 |
| 563 | TCCCAACCTGCGCCGTTCCC | 104 |
| 564 | GTCCCAACCTGCGCCGTTCC | 103 |
| 565 | AGTCCCAACCTGCGCCGTTC | 102 |
| 566 | AAGTCCCAACCTGCGCCGTT | 101 |
| 567 | GAAGTCCCAACCTGCGCCGT | 100 |
| 568 | GGAAGTCCCAACCTGCGCCG | 99 |
| 569 | GGGAAGTCCCAACCTGCGCC | 98 |
| 570 | AGGGAAGTCCCAACCTGCGC | 97 |
| 571 | GAGGGAAGTCCCAACCTGCG | 96 |
| 572 | GAAGCGACGCCCTTGACCTCCGGCCCGG | 35 |
| 573 | AAGCGACGCCCTTGACCTCC | 36 |
| 574 | AGCGACGCCCTTGACCTCCG | 37 |
| 575 | GCGACGCCCTTGACCTCCGG | 38 |
| 576 | CGACGCCCTTGACCTCCGGC | 39 |
| 577 | GACGCCCTTGACCTCCGGCC | 40 |
| 578 | ACGCCCTTGACCTCCGGCCC | 41 |
| 579 | CGCCCTTGACCTCCGGCCCG | 42 |
| 580 | GCCCTTGACCTCCGGCCCGG | 43 |
| 581 | CCCTTGACCTCCGGCCCGGG | 44 |
| 582 | CCTTGACCTCCGGCCCGGGG | 45 |
| 583 | CTTGACCTCCGGCCCGGGGT | 46 |
| 584 | TTGACCTCCGGCCCGGGGTT | 47 |
| 585 | TGACCTCCGGCCCGGGGTTA | 48 |
| 586 | GACCTCCGGCCCGGGGTTAC | 49 |
| 587 | ACCTCCGGCCCGGGGTTACC | 50 |
| 588 | CCTCCGGCCCGGGGTTACCA | 51 |
| 589 | CTCCGGCCCGGGGTTACCAC | 52 |
| 590 | TCCGGCCCGGGGTTACCACA | 53 |
| 591 | CCGGCCCGGGGTTACCACAT | 54 |
| 592 | CGGCCCGGGGTTACCACATG | 55 |
| 593 | GGCCCGGGGTTACCACATGC | 56 |
| 594 | GCCCGGGGTTACCACATGCC | 57 |
| 595 | CCCGGGGTTACCACATGCCT | 58 |
| 596 | CCGGGGTTACCACATGCCTT | 59 |
| 597 | CGGGGTTACCACATGCCTTG | 60 |
| 598 | AGAAGCGACGCCCTTGACCT | 34 |
| 599 | GAGAAGCGACGCCCTTGACC | 33 |
| 600 | GGAGAAGCGACGCCCTTGAC | 32 |
| 601 | GGGAGAAGCGACGCCCTTGA | 31 |
| 602 | AGGGAGAAGCGACGCCCTTG | 30 |
| 603 | TAGGGAGAAGCGACGCCCTT | 29 |
| 604 | TTAGGGAGAAGCGACGCCCT | 28 |
| 605 | ATTAGGGAGAAGCGACGCCC | 27 |
| 606 | CATTAGGGAGAAGCGACGCC | 26 |
| 607 | CCCCCGATGCTCTTCACCTCGGG | 261 |
| 608 | CCCCGATGCTCTTCACCTCG | 262 |
| 609 | CCCGATGCTCTTCACCTCGG | 263 |
| 610 | CCGATGCTCTTCACCTCGGG | 264 |
| 611 | CGATGCTCTTCACCTCGGGA | 265 |
| 612 | GATGCTCTTCACCTCGGGAG | 266 |
| 613 | ATGCTCTTCACCTCGGGAGC | 267 |
| 614 | TGCTCTTCACCTCGGGAGCC | 268 |
| 615 | GCTCTTCACCTCGGGAGCCC | 269 |
| 616 | CTCTTCACCTCGGGAGCCCG | 270 |
| 617 | TCTTCACCTCGGGAGCCCGG | 271 |
| 618 | CTTCACCTCGGGAGCCCGGA | 272 |
| 619 | TTCACCTCGGGAGCCCGGAG | 273 |
| 620 | TCACCTCGGGAGCCCGGAGC | 274 |
| 621 | CACCTCGGGAGCCCGGAGCC | 275 |
| 622 | ACCTCGGGAGCCCGGAGCCC | 276 |
| 623 | CCTCGGGAGCCCGGAGCCCG | 277 |
| 624 | CTCGGGAGCCCGGAGCCCGT | 278 |
| 625 | TCGGGAGCCCGGAGCCCGTC | 279 |
| 626 | CGGGAGCCCGGAGCCCGTCA | 280 |
| 627 | GGGAGCCCGGAGCCCGTCAC | 281 |
| 628 | GGAGCCCGGAGCCCGTCACC | 282 |
| 629 | GAGCCCGGAGCCCGTCACCC | 283 |
| 630 | AGCCCGGAGCCCGTCACCCA | 284 |
| 631 | GCCCGGAGCCCGTCACCCAA | 285 |
| 632 | CCCGGAGCCCGTCACCCAAG | 286 |
| 633 | CCGGAGCCCGTCACCCAAGT | 287 |
| 634 | CGGAGCCCGTCACCCAAGTC | 288 |
| 635 | GGAGCCCGTCACCCAAGTCC | 289 |
| 636 | GAGCCCGTCACCCAAGTCCG | 290 |
| 637 | AGCCCGTCACCCAAGTCCGG | 291 |
| 638 | GCCCGTCACCCAAGTCCGGT | 292 |
| 639 | CCCGTCACCCAAGTCCGGTC | 293 |
| 640 | CCGTCACCCAAGTCCGGTCT | 294 |
| 641 | CGTCACCCAAGTCCGGTCTA | 295 |
| 642 | GTCACCCAAGTCCGGTCTAC | 296 |
| 643 | TCACCCAAGTCCGGTCTACC | 297 |
| 644 | CACCCAAGTCCGGTCTACCG | 298 |
| 645 | ACCCAAGTCCGGTCTACCGC | 299 |
| 646 | CCCAAGTCCGGTCTACCGCG | 300 |
| 647 | CCAAGTCCGGTCTACCGCGG | 301 |
| 648 | CAAGTCCGGTCTACCGCGGA | 302 |
| 649 | AAGTCCGGTCTACCGCGGAG | 303 |
| 650 | AGTCCGGTCTACCGCGGAGG | 304 |
| 651 | GTCCGGTCTACCGCGGAGGC | 305 |
| 652 | TCCGGTCTACCGCGGAGGCA | 306 |
| 653 | CCGGTCTACCGCGGAGGCAC | 307 |
| 654 | CGGTCTACCGCGGAGGCACT | 308 |
| 655 | GGTCTACCGCGGAGGCACTG | 309 |
| 656 | GTCTACCGCGGAGGCACTGT | 310 |
| 657 | TCTACCGCGGAGGCACTGTG | 311 |
| 658 | CTACCGCGGAGGCACTGTGG | 312 |
| 659 | TACCGCGGAGGCACTGTGGC | 313 |
| 660 | ACCGCGGAGGCACTGTGGCC | 314 |
| 661 | CCGCGGAGGCACTGTGGCCT | 315 |
| 662 | CGCGGAGGCACTGTGGCCTC | 316 |
| 663 | GCGGAGGCACTGTGGCCTCG | 317 |
| 664 | CGGAGGCACTGTGGCCTCGG | 318 |
| 665 | GGAGGCACTGTGGCCTCGGG | 319 |
| 666 | GAGGCACTGTGGCCTCGGGT | 320 |
| 667 | AGGCACTGTGGCCTCGGGTC | 321 |
| 668 | GGCACTGTGGCCTCGGGTCG | 322 |
| 669 | GCACTGTGGCCTCGGGTCGG | 323 |
| 670 | CACTGTGGCCTCGGGTCGGC | 324 |
| 671 | ACTGTGGCCTCGGGTCGGCC | 325 |
| 672 | CTGTGGCCTCGGGTCGGCCC | 326 |
| 673 | TGTGGCCTCGGGTCGGCCCC | 327 |
| 674 | GTGGCCTCGGGTCGGCCCCG | 328 |
| 675 | TGGCCTCGGGTCGGCCCCGG | 329 |
| 676 | GGCCTCGGGTCGGCCCCGGA | 330 |
| 677 | GCCTCGGGTCGGCCCCGGAG | 331 |
| 678 | CCTCGGGTCGGCCCCGGAGC | 332 |
| 679 | CTCGGGTCGGCCCCGGAGCG | 333 |
| 680 | TCGGGTCGGCCCCGGAGCGA | 334 |
| 681 | CGGGTCGGCCCCGGAGCGAG | 335 |
| 682 | GGGTCGGCCCCGGAGCGAGG | 336 |
| 683 | GGTCGGCCCCGGAGCGAGGC | 337 |
| 684 | GTCGGCCCCGGAGCGAGGCC | 338 |
| 685 | TCGGCCCCGGAGCGAGGCCT | 339 |
| 686 | CGGCCCCGGAGCGAGGCCTC | 340 |
| 687 | GGCCCCGGAGCGAGGCCTCC | 341 |
| 688 | GCCCCGGAGCGAGGCCTCCA | 342 |
| 689 | CCCCGGAGCGAGGCCTCCAG | 343 |
| 690 | CCCGGAGCGAGGCCTCCAGA | 344 |
| 691 | CCGGAGCGAGGCCTCCAGAA | 345 |
| 692 | CGGAGCGAGGCCTCCAGAAC | 346 |
| 693 | GGAGCGAGGCCTCCAGAACT | 347 |
| 694 | GAGCGAGGCCTCCAGAACTA | 348 |
| 695 | AGCGAGGCCTCCAGAACTAC | 349 |
| 696 | GCGAGGCCTCCAGAACTACC | 350 |
| 697 | CGAGGCCTCCAGAACTACCA | 351 |
| 698 | GCCCCCGATGCTCTTCACCT | 260 |
| 699 | AGCCCCCGATGCTCTTCACC | 259 |
| 700 | CAGCCCCCGATGCTCTTCAC | 258 |
| 701 | TCAGCCCCCGATGCTCTTCA | 257 |
| 702 | CTCAGCCCCCGATGCTCTTC | 256 |
| 703 | CCTCAGCCCCCGATGCTCTT | 255 |
| 704 | ACCTCAGCCCCCGATGCTCT | 254 |
| 705 | CACCTCAGCCCCCGATGCTC | 253 |
| 706 | CCACCTCAGCCCCCGATGCT | 252 |
| 707 | CCCACCTCAGCCCCCGATGC | 251 |
| 708 | TCCCACCTCAGCCCCCGATG | 250 |
| 709 | GTCCCACCTCAGCCCCCGAT | 249 |
| 710 | GGTCCCACCTCAGCCCCCGA | 248 |
| 711 | AGGTCCCACCTCAGCCCCCG | 247 |
| 712 | CGGGTCGGCCCCGGAGCGAGGCC | 335 |
| 713 | GGGTCGGCCCCGGAGCGAGG | 336 |
| 714 | GGTCGGCCCCGGAGCGAGGC | 337 |
| 715 | GTCGGCCCCGGAGCGAGGCC | 338 |
| 716 | TCGGCCCCGGAGCGAGGCCT | 339 |
| 717 | CGGCCCCGGAGCGAGGCCTC | 340 |
| 718 | GGCCCCGGAGCGAGGCCTCC | 341 |
| 719 | GCCCCGGAGCGAGGCCTCCA | 342 |
| 720 | CCCCGGAGCGAGGCCTCCAG | 343 |
| 721 | CCCGGAGCGAGGCCTCCAGA | 344 |
| 722 | CCGGAGCGAGGCCTCCAGAA | 345 |
| 723 | CGGAGCGAGGCCTCCAGAAC | 346 |
| 724 | GGAGCGAGGCCTCCAGAACT | 347 |
| 725 | GAGCGAGGCCTCCAGAACTA | 348 |
| 726 | AGCGAGGCCTCCAGAACTAC | 349 |
| 727 | GCGAGGCCTCCAGAACTACC | 350 |
| 728 | CGAGGCCTCCAGAACTACCA | 351 |
| 729 | TCGGGTCGGCCCCGGAGCGA | 334 |
| 730 | CTCGGGTCGGCCCCGGAGCG | 333 |
| 731 | CCTCGGGTCGGCCCCGGAGC | 332 |
| 732 | GCCTCGGGTCGGCCCCGGAG | 331 |
| 733 | GGCCTCGGGTCGGCCCCGGA | 330 |
| 734 | TGGCCTCGGGTCGGCCCCGG | 329 |
| 735 | GTGGCCTCGGGTCGGCCCCG | 328 |
| 736 | TGTGGCCTCGGGTCGGCCCC | 327 |
| 737 | CTGTGGCCTCGGGTCGGCCC | 326 |
| 738 | ACTGTGGCCTCGGGTCGGCC | 325 |
| 739 | CACTGTGGCCTCGGGTCGGC | 324 |
| 740 | GCACTGTGGCCTCGGGTCGG | 323 |
| 741 | GGCACTGTGGCCTCGGGTCG | 322 |
| 742 | AGGCACTGTGGCCTCGGGTC | 321 |
| 743 | GAGGCACTGTGGCCTCGGGT | 320 |
| 744 | GGAGGCACTGTGGCCTCGGG | 319 |
| 745 | CGGAGGCACTGTGGCCTCGG | 318 |
| 746 | GCGGAGGCACTGTGGCCTCG | 317 |
| 747 | CGCGGAGGCACTGTGGCCTC | 316 |
| 748 | CCGCGGAGGCACTGTGGCCT | 315 |
| 749 | ACCGCGGAGGCACTGTGGCC | 314 |
| 750 | TACCGCGGAGGCACTGTGGC | 313 |
| 751 | CTACCGCGGAGGCACTGTGG | 312 |
| 752 | TCTACCGCGGAGGCACTGTG | 311 |
| 753 | GTCTACCGCGGAGGCACTGT | 310 |
| 754 | GGTCTACCGCGGAGGCACTG | 309 |
| 755 | CGGTCTACCGCGGAGGCACT | 308 |
| 756 | CCGGTCTACCGCGGAGGCAC | 307 |
| 757 | TCCGGTCTACCGCGGAGGCA | 306 |
| 758 | GTCCGGTCTACCGCGGAGGC | 305 |
| 759 | AGTCCGGTCTACCGCGGAGG | 304 |
| 760 | AAGTCCGGTCTACCGCGGAG | 303 |
| 761 | CAAGTCCGGTCTACCGCGGA | 302 |
| 762 | CCAAGTCCGGTCTACCGCGG | 301 |
| 763 | CCCAAGTCCGGTCTACCGCG | 300 |
| 764 | ACCCAAGTCCGGTCTACCGC | 299 |
| 765 | CACCCAAGTCCGGTCTACCG | 298 |
| 766 | TCACCCAAGTCCGGTCTACC | 297 |
| 767 | GTCACCCAAGTCCGGTCTAC | 296 |
| 768 | CGTCACCCAAGTCCGGTCTA | 295 |
| 769 | CCGTCACCCAAGTCCGGTCT | 294 |
| 770 | CCCGTCACCCAAGTCCGGTC | 293 |
| 771 | GCCCGTCACCCAAGTCCGGT | 292 |
| 772 | AGCCCGTCACCCAAGTCCGG | 291 |
| 773 | GAGCCCGTCACCCAAGTCCG | 290 |
| 774 | GGAGCCCGTCACCCAAGTCC | 289 |
| 775 | CGGAGCCCGTCACCCAAGTC | 288 |
| 776 | CCGGAGCCCGTCACCCAAGT | 287 |
| 777 | CCCGGAGCCCGTCACCCAAG | 286 |
| 778 | GCCCGGAGCCCGTCACCCAA | 285 |
| 779 | AGCCCGGAGCCCGTCACCCA | 284 |
| 780 | GAGCCCGGAGCCCGTCACCC | 283 |
| 781 | GGAGCCCGGAGCCCGTCACC | 282 |
| 782 | GGGAGCCCGGAGCCCGTCAC | 281 |
| 783 | CGGGAGCCCGGAGCCCGTCA | 280 |
| 784 | TCGGGAGCCCGGAGCCCGTC | 279 |
| 785 | CTCGGGAGCCCGGAGCCCGT | 278 |
| 786 | CCTCGGGAGCCCGGAGCCCG | 277 |
| 787 | ACCTCGGGAGCCCGGAGCCC | 276 |
| 788 | CACCTCGGGAGCCCGGAGCC | 275 |
| 789 | TCACCTCGGGAGCCCGGAGC | 274 |
| 790 | TTCACCTCGGGAGCCCGGAG | 273 |
| 791 | CTTCACCTCGGGAGCCCGGA | 272 |
| 792 | TCTTCACCTCGGGAGCCCGG | 271 |
| 793 | CTCTTCACCTCGGGAGCCCG | 270 |
| 794 | GCTCTTCACCTCGGGAGCCC | 269 |
| 795 | TGCTCTTCACCTCGGGAGCC | 268 |
| 796 | ATGCTCTTCACCTCGGGAGC | 267 |
| 797 | GATGCTCTTCACCTCGGGAG | 266 |
| 798 | CGATGCTCTTCACCTCGGGA | 265 |
| 799 | CCGATGCTCTTCACCTCGGG | 264 |
| 800 | CCCGATGCTCTTCACCTCGG | 263 |
| 801 | CCCCGATGCTCTTCACCTCG | 262 |
| 802 | CCCCCGATGCTCTTCACCTC | 261 |
| 803 | GCCCCCGATGCTCTTCACCT | 260 |
| 804 | AGCCCCCGATGCTCTTCACC | 259 |
| 805 | CAGCCCCCGATGCTCTTCAC | 258 |
| 806 | TCAGCCCCCGATGCTCTTCA | 257 |
| 807 | CTCAGCCCCCGATGCTCTTC | 256 |
| 808 | CCTCAGCCCCCGATGCTCTT | 255 |
| 809 | ACCTCAGCCCCCGATGCTCT | 254 |
| 810 | CACCTCAGCCCCCGATGCTC | 253 |
| 811 | CCACCTCAGCCCCCGATGCT | 252 |
| 812 | CCCACCTCAGCCCCCGATGC | 251 |
| 813 | TCCCACCTCAGCCCCCGATG | 250 |
| 814 | GTCCCACCTCAGCCCCCGAT | 249 |
| 815 | GGTCCCACCTCAGCCCCCGA | 248 |
| 816 | AGGTCCCACCTCAGCCCCCG | 247 |
| 817 | GCCCGGCAGCGGCCCCCAGAGGCCG | 475 |
| 818 | CCCGGCAGCGGCCCCCAGAG | 476 |
| 819 | CCGGCAGCGGCCCCCAGAGG | 477 |
| 820 | CGGCAGCGGCCCCCAGAGGC | 478 |
| 821 | GGCAGCGGCCCCCAGAGGCC | 479 |
| 822 | GCAGCGGCCCCCAGAGGCCG | 480 |
| 823 | CAGCGGCCCCCAGAGGCCGG | 481 |
| 824 | AGCGGCCCCCAGAGGCCGGG | 482 |
| 825 | GCGGCCCCCAGAGGCCGGGC | 483 |
| 826 | CGGCCCCCAGAGGCCGGGCT | 484 |
| 827 | GGCCCCCAGAGGCCGGGCTG | 485 |
| 828 | GCCCCCAGAGGCCGGGCTGG | 486 |
| 829 | CCCCCAGAGGCCGGGCTGGG | 487 |
| 830 | CCCCAGAGGCCGGGCTGGGA | 488 |
| 831 | CCCAGAGGCCGGGCTGGGAA | 489 |
| 832 | GGCCCGGCAGCGGCCCCCAG | 474 |
| 833 | AGGCCCGGCAGCGGCCCCCA | 473 |
| 834 | CAGGCCCGGCAGCGGCCCCC | 472 |
| 835 | ACAGGCCCGGCAGCGGCCCC | 471 |
| 836 | CACAGGCCCGGCAGCGGCCC | 470 |
| 837 | TCACAGGCCCGGCAGCGGCC | 469 |
| 838 | CTCACAGGCCCGGCAGCGGC | 468 |
| 839 | GCTCACAGGCCCGGCAGCGG | 467 |
| 840 | GGCTCACAGGCCCGGCAGCG | 466 |
| 841 | AGGCTCACAGGCCCGGCAGC | 465 |
| 842 | CAGGCTCACAGGCCCGGCAG | 464 |
| 843 | ACAGGCTCACAGGCCCGGCA | 463 |
| 844 | CACAGGCTCACAGGCCCGGC | 462 |
| 845 | CCACAGGCTCACAGGCCCGG | 461 |
| 846 | TCCACAGGCTCACAGGCCCG | 460 |
| 847 | CGGTCTACCGCGGAGGCACTGTGGCCTCGG | 308 |
| 848 | GGTCTACCGCGGAGGCACTG | 309 |
| 849 | GTCTACCGCGGAGGCACTGT | 310 |
| 850 | TCTACCGCGGAGGCACTGTG | 311 |
| 851 | CTACCGCGGAGGCACTGTGG | 312 |
| 852 | TACCGCGGAGGCACTGTGGC | 313 |
| 853 | ACCGCGGAGGCACTGTGGCC | 314 |
| 854 | CCGCGGAGGCACTGTGGCCT | 315 |
| 855 | CGCGGAGGCACTGTGGCCTC | 316 |
| 856 | GCGGAGGCACTGTGGCCTCG | 317 |
| 857 | CGGAGGCACTGTGGCCTCGG | 318 |
| 858 | GGAGGCACTGTGGCCTCGGG | 319 |
| 859 | GAGGCACTGTGGCCTCGGGT | 320 |
| 860 | AGGCACTGTGGCCTCGGGTC | 321 |
| 861 | GGCACTGTGGCCTCGGGTCG | 322 |
| 862 | GCACTGTGGCCTCGGGTCGG | 323 |
| 863 | CACTGTGGCCTCGGGTCGGC | 324 |
| 864 | ACTGTGGCCTCGGGTCGGCC | 325 |
| 865 | CTGTGGCCTCGGGTCGGCCC | 326 |
| 866 | TGTGGCCTCGGGTCGGCCCC | 327 |
| 867 | GTGGCCTCGGGTCGGCCCCG | 328 |
| 868 | TGGCCTCGGGTCGGCCCCGG | 329 |
| 869 | GGCCTCGGGTCGGCCCCGGA | 330 |
| 870 | GCCTCGGGTCGGCCCCGGAG | 331 |
| 871 | CCTCGGGTCGGCCCCGGAGC | 332 |
| 872 | CTCGGGTCGGCCCCGGAGCG | 333 |
| 873 | TCGGGTCGGCCCCGGAGCGA | 334 |
| 874 | CGGGTCGGCCCCGGAGCGAG | 335 |
| 875 | GGGTCGGCCCCGGAGCGAGG | 336 |
| 876 | GGTCGGCCCCGGAGCGAGGC | 337 |
| 877 | GTCGGCCCCGGAGCGAGGCC | 338 |
| 878 | TCGGCCCCGGAGCGAGGCCT | 339 |
| 879 | CGGCCCCGGAGCGAGGCCTC | 340 |
| 880 | GGCCCCGGAGCGAGGCCTCC | 341 |
| 881 | GCCCCGGAGCGAGGCCTCCA | 342 |
| 882 | CCCCGGAGCGAGGCCTCCAG | 343 |
| 883 | CCCGGAGCGAGGCCTCCAGA | 344 |
| 884 | CCGGAGCGAGGCCTCCAGAA | 345 |
| 885 | CGGAGCGAGGCCTCCAGAAC | 346 |
| 886 | GGAGCGAGGCCTCCAGAACT | 347 |
| 887 | GAGCGAGGCCTCCAGAACTA | 348 |
| 888 | AGCGAGGCCTCCAGAACTAC | 349 |
| 889 | GCGAGGCCTCCAGAACTACC | 350 |
| 890 | CGAGGCCTCCAGAACTACCA | 351 |
| 891 | CCGGTCTACCGCGGAGGCAC | 307 |
| 892 | TCCGGTCTACCGCGGAGGCA | 306 |
| 893 | GTCCGGTCTACCGCGGAGGC | 305 |
| 894 | AGTCCGGTCTACCGCGGAGG | 304 |
| 895 | AAGTCCGGTCTACCGCGGAG | 303 |
| 896 | CAAGTCCGGTCTACCGCGGA | 302 |
| 897 | CCAAGTCCGGTCTACCGCGG | 301 |
| 898 | CCCAAGTCCGGTCTACCGCG | 300 |
| 899 | ACCCAAGTCCGGTCTACCGC | 299 |
| 900 | CACCCAAGTCCGGTCTACCG | 298 |
| 901 | TCACCCAAGTCCGGTCTACC | 297 |
| 902 | GTCACCCAAGTCCGGTCTAC | 296 |
| 903 | CGTCACCCAAGTCCGGTCTA | 295 |
| 904 | CCGTCACCCAAGTCCGGTCT | 294 |
| 905 | CCCGTCACCCAAGTCCGGTC | 293 |
| 906 | GCCCGTCACCCAAGTCCGGT | 292 |
| 907 | AGCCCGTCACCCAAGTCCGG | 291 |
| 908 | GAGCCCGTCACCCAAGTCCG | 290 |
| 909 | GGAGCCCGTCACCCAAGTCC | 289 |
| 910 | CGGAGCCCGTCACCCAAGTC | 288 |
| 911 | CCGGAGCCCGTCACCCAAGT | 287 |
| 912 | CCCGGAGCCCGTCACCCAAG | 286 |
| 913 | GCCCGGAGCCCGTCACCCAA | 285 |
| 914 | AGCCCGGAGCCCGTCACCCA | 284 |
| 915 | GAGCCCGGAGCCCGTCACCC | 283 |
| 916 | GGAGCCCGGAGCCCGTCACC | 282 |
| 917 | GGGAGCCCGGAGCCCGTCAC | 281 |
| 918 | CGGGAGCCCGGAGCCCGTCA | 280 |
| 919 | TCGGGAGCCCGGAGCCCGTC | 279 |
| 920 | CTCGGGAGCCCGGAGCCCGT | 278 |
| 921 | CCTCGGGAGCCCGGAGCCCG | 277 |
| 922 | ACCTCGGGAGCCCGGAGCCC | 276 |
| 923 | CACCTCGGGAGCCCGGAGCC | 275 |
| 924 | TCACCTCGGGAGCCCGGAGC | 274 |
| 925 | TTCACCTCGGGAGCCCGGAG | 273 |
| 926 | CTTCACCTCGGGAGCCCGGA | 272 |
| 927 | TCTTCACCTCGGGAGCCCGG | 271 |
| 928 | CTCTTCACCTCGGGAGCCCG | 270 |
| 929 | GCTCTTCACCTCGGGAGCCC | 269 |
| 930 | TGCTCTTCACCTCGGGAGCC | 268 |
| 931 | ATGCTCTTCACCTCGGGAGC | 267 |
| 932 | GATGCTCTTCACCTCGGGAG | 266 |
| 933 | CGATGCTCTTCACCTCGGGA | 265 |
| 934 | CCGATGCTCTTCACCTCGGG | 264 |
| 935 | CCCGATGCTCTTCACCTCGG | 263 |
| 936 | CCCCGATGCTCTTCACCTCG | 262 |
| 937 | CCCCCGATGCTCTTCACCTC | 261 |
| 938 | GCCCCCGATGCTCTTCACCT | 260 |
| 939 | AGCCCCCGATGCTCTTCACC | 259 |
| 940 | CAGCCCCCGATGCTCTTCAC | 258 |
| 941 | TCAGCCCCCGATGCTCTTCA | 257 |
| 942 | CTCAGCCCCCGATGCTCTTC | 256 |
| 943 | CCTCAGCCCCCGATGCTCTT | 255 |
| 944 | ACCTCAGCCCCCGATGCTCT | 254 |
| 945 | CACCTCAGCCCCCGATGCTC | 253 |
| 946 | CCACCTCAGCCCCCGATGCT | 252 |
| 947 | CCCACCTCAGCCCCCGATGC | 251 |
| 948 | TCCCACCTCAGCCCCCGATG | 250 |
| 949 | GTCCCACCTCAGCCCCCGAT | 249 |
| 950 | GGTCCCACCTCAGCCCCCGA | 248 |
| 951 | AGGTCCCACCTCAGCCCCCG | 247 |
| 952 | ACAAAAACTAGCCGGGCGTGGTGGGGCACGCC | 735 |
| 953 | CAAAAACTAGCCGGGCGTGG | 736 |
| 954 | AAAAACTAGCCGGGCGTGGT | 737 |
| 955 | AAAACTAGCCGGGCGTGGTG | 738 |
| 956 | AAACTAGCCGGGCGTGGTGG | 739 |
| 957 | AACTAGCCGGGCGTGGTGGG | 740 |
| 958 | ACTAGCCGGGCGTGGTGGGG | 741 |
| 959 | CTAGCCGGGCGTGGTGGGGC | 742 |
| 960 | TAGCCGGGCGTGGTGGGGCA | 743 |
| 961 | AGCCGGGCGTGGTGGGGCAC | 744 |
| 962 | GCCGGGCGTGGTGGGGCACG | 745 |
| 963 | CCGGGCGTGGTGGGGCACGC | 746 |
| 964 | CGGGCGTGGTGGGGCACGCC | 747 |
| 965 | GGGCGTGGTGGGGCACGCCT | 748 |
| 966 | GGCGTGGTGGGGCACGCCTA | 749 |
| 967 | GCGTGGTGGGGCACGCCTAT | 750 |
| 968 | CGTGGTGGGGCACGCCTATA | 751 |
| 969 | GTGGTGGGGCACGCCTATAA | 752 |
| 970 | TGGTGGGGCACGCCTATAAT | 753 |
| 971 | GGTGGGGCACGCCTATAATC | 754 |
| 972 | GTGGGGCACGCCTATAATCC | 755 |
| 973 | TGGGGCACGCCTATAATCCC | 756 |
| 974 | GGGGCACGCCTATAATCCCA | 757 |
| 975 | GGGCACGCCTATAATCCCAG | 758 |
| 976 | GGCACGCCTATAATCCCAGC | 759 |
| 977 | GCACGCCTATAATCCCAGCT | 760 |
| 978 | CACGCCTATAATCCCAGCTT | 761 |
| 979 | ACGCCTATAATCCCAGCTTA | 762 |
| 980 | CGCCTATAATCCCAGCTTAA | 763 |
| 981 | TACAAAAACTAGCCGGGCGT | 734 |
| 982 | ATACAAAAACTAGCCGGGCG | 733 |
| 983 | AATACAAAAACTAGCCGGGC | 732 |

Hot Zones (Relative upstream location to gene start site)
1-1200
1850-2200
2550-3000
3300-3500

### Examples

[0299] FIG. 10 shows that BE1 (11) and BE2 (12), both at 10 μM, demonstrated statistically significant (P<0.05) inhibition compared to the untreated control inhibition values in DU145 (human prostate cell line). The negative control did not produce a statistically significant difference compared to the untreated control. The Beclin-1 sequences BE1 (11) and BE2 (12) fit the independent and dependent DNAi motif claims.

[0300] FIG. 11 shows that BE2 (12) at 10 μM demonstrated statistically significant (P<0.05) inhibition compared to the untreated and negative control values in HCT-116 (human colorectal carcinoma). The negative control did not produce a statistically significant difference compared to the untreated control. BE2 (12) fit the independent and dependent DNAi motif claims.

[0301] The secondary structures for BE1 and BE2 are shown in FIGS. 12 and 13. Sequence 11 (BE1) is shown in FIG. 12 and Sequence 12 (BE2) is shown in FIG. 13.

Genetic Code (5′ Upstream Region)
(SEQ ID NO: 11951)
ACTTACCACCCTCAGTGGTTTCCAGATAACATAGGCCTTCCTGAATCCCC
CAGTTGAAGCAGCTCCTCCCACCCTGCCCCCACTTACTCTCTATCACATC
ACCTTCTTACCTACTGTATTAGCTTTCTAGGGCTGCTGTAGCAAAGTACC
ACAAAGTGGATGGCTTAGAACCAAAGAAATATATTGTCTCAGAGTTCTGG
ATGCCAGAAATCCAAAATTAAGGTGTCAGCAGGACCATGTTCCTTCTAAG
GGAGCCAGAGAAGTATCTGTTCCAGACCTCTTTCCTGGCTTTTGGTAGCC
TCAGGTCTTCCTTGGCTTACAGATCACCCTGTGTCTCTTTACATCATCTT
CCCTCAGACACGGTACATGTCTGTCTCTGTGTCCAGATTGCCCCTATTTA
TAAGGACGCAGTCATATTGGTCTAGGGCTAACATCAATGACCTCATCTGC
AACGATCCTATTTCCAAAAAAGGTCACATTCCCATGTGTTAGTCCCAGAT
GTTAGGACTTCAACATCTTTTGGGGGACATCATTCAACCCATAATATCTG
CCATTATCTGAAATTATCTTATTAACTTGGTTACATGTTTACTGTCAAAT
TCTCTCCTCTGGAATATAAACTATTAGAGCAGTTCACCAGTATATCCTCT
CAGACCTAGAATAGGGACTGGCACATAGTAGATGCTCAATAAACATCTGT
TGAATCGATGACTGAGGATATGTTGTGTATTATTCACAATCCCTCAAGCA
CTACATACACTGATTACATATACTTCCCAAGTGTGAGGATACACAGAGCA
TTCACTATGTAACAGTCATTCCCCTCCATTCCAAATGTATCAGCTCATTT
ATCACACTACCCTTTATGATATTTACTACTGTATACTATTAATCTCATTT
TGTAAATAAGAAAACAAAGCACAGAACAGTTGAATAAATTGCATAAGGTC
ACATGGTTAGTGGATGGTAAAGAACCAGGTGGTCTCAACTTCCAAATCCT
CAGTTGTAACACTATACCCCCTACCTCTCTAGAAGCCCGTTACTTCTCTA
TGCGTTTCTGAGATGTTAGGGACAGCCAAGCAGGAAGAAACGCAGGACTA
TGAAGCAGCCACACCAGGACTAGGTGAGAATTCTTTGGGGATGATTCCAG
TCACCTCCCCTAAAGGGGCTTTCATGCTGAAAGAGCCAAGAGGAAGAAGG
ATTGTAAACACTATCCCTAGTCACAAAACCGGGAGAAAAATCAATCTAGT
TCCACATATCACATCCAATACCAACTATAAGAAACCACATACATTTAAAA
GAAAAGAAAGACACTTCTGGAGGTGGGAATAACTTTCTAAGCAGTATAAG
TCATCAAGAAAAATAAGCAGATTTGACTTGAAAATTTAAAACTTCCTGAA
CATCTGGAAAATAATTAAAGCATTCATGAAAAATTACTAAAAATACTGAG
AAAAATACTAATAATCCAATACCTAAATAATCAAAGAATGCAAACATAAT
TCAGAAAAAAGTAACTACTGCTTGAGCCCGGGAGGCGGAGATTCCAGTGA
GCTGATATTGCACCACTGCACTCCAGCCTGGGTGACAGAGTGAGACCGTG
TCTCTTTTTTTTTTTTTTTTTAAAAAAAGGCCGGGCATGGTGGCTCACAC
CTGTAATCCCAGCACTTTGGGAGGCCAAGGCGGGCAGATCAGGAGGTCAG
GAGATTGAGACCATCCTGGCTAACATGGTGAAACCGTCTCCACTAAAAAT
ATAAAAAATTAGCCGGGTGTAGTGGTGGGCGCCTGTAGTCCCAGCTACTC
GGGAGGCTGAGACAGGAGAATGGCGTGAACCCAGGAGGCAGAGGTTGCAG
TGAGCCGAGATGGCACCACTGCACTCCAGCCTGGGCAACAGAGCAAGACT
CCATCTCAAAAAAAAAAAAAAAAGTAACTACAATAAGCAAATACATAGCA
AAAAGTTCAGCCTTACCAGCAATCAATGATGCTAATTAAAATAACAAGGA
AGTGCCATTTTTTGCTTTTGTTCCCCAAATATATGATACCCAATACTGGC
CAAGGCAATATGAAAACAGGCTTCCTCATACATTACTGGAAGCAGAATAT
AGTTATGTGCAAGCACTTTGGAAAATGATTCCCAGTGTTAAGGAAGAGAC
ATTAAATAGCTGACACACTCTTAATTCTGTAGTCCCAGTTATGAGTCTCT
ATCATAAGTAGCCAGCTCTTCATTGCAGGATTATTGTAATCACCCACAGG
GGAAATAGTAGAATTTCCAGCGGTAAAAAAATACACTAAGGCAGTACATT
TAGTGTAGTGTAATGTAGCCATGATAACTACAATAACTGTGTAGCAACAT
AGAAAAATGTTAAATTTAAAAAGCAGAAGCCTGGGCAACAAAGTGAGACC
CCATCTCTTTTTTTTTTTGAGATGGCGTCTCGCTCTGTCACCGAGGCTGG
AGTGCAGTGTGAGACCACATCTCTACAAAAAATTTTAAAAATTAGCTGGG
CATGGTAGTGATCACCTGTGGTCCCTGCTACACTGGAGGTTGAAGCAAGA
GGATTGCTTGAGCCAGGAAGTCAAATCTGCAGTGAGCCATGTTTGTTTGT
TCCGCTTCACTCCAGCCTGGGTAACAGAGTAAGACACTGTCTCAAAATAA
AAATAAAATAGACAATACTACATACAATTTTGGGTTAAGCAGTGGTTTCT
TTTACACCAAAAGCATAAACATTGGACTTTATTGAAATGAAAAACTTTTG
GCCAGGCACATTGGCTCACACCTGTAATCTCAGCACTTTGGGAGGCCACA
GTGGGGGATTGCAAGGGGAGATGGGAAATGTTCTAAAACTGGATTATGGT
GATAGTTGGGCAACTGTGTAAATTTACTAAAAATTATTGAACTGTACATT
TAAAAAGTGTGAGTCTTATGGTATGTAAATTATACCCCATAAAGTTGTTT
TTAAAAATGAAGTAAGTCCCTCTGCTCAAGACCCAGTCATCTCATCTCAT
TCAAAGTGAAAGCCAGAGCTTTACAATCCCTATAAGAGCCTAGGTGGTAG
CTCAACACTCTTACCTCCCTCACCCCATTTTCTGTATCTCTTTTCGTTGC
CCATCTTCTAGCCACACCAGCCTCTGCTAATCCCCAAACAGGTACCCTCT
GTGCTCTTGCTGTTCCCTTGGCCTAGAATGCTCTTCCTTAAGATGCAGGT
AAGAATTCCTTCCTCACCTTCTTCAAGCTTTTATTTGAATATCACTTTCT
TTTTTTGTTGGTTTTGTGTGTGTGTGTGGGGGGGGGGGGTTTGAGATGGA
GTTTCCTTCTGTCGCCCAGGCTGGAGTGCAGTGGCATGATCTCGACTCAC
TGCAACCTCCGCCTCCGGGGGTCAAGCGATTTTCCTACCCCAGCCTCCTG
AGTAGCTGGGATTACAGGCGCACGCCACCATGCCCAGCTAATTGTATTTT
TTAGTAGAGACGGGATTTAACCATTTTGGCCAGGCTGGTCTCGAACTCCT
GACCTTGTGATCCGCCCGCCTCGGCCTCCCAAAGTGCTGGAATTACAAGC
GTGAGCCACCATGCCCGGCCTTTTGTTGTTGCTGTTGTTGTTCTGAGATG
GAGCCTTGCCCTGTCGCCCAGGCTGGAGTGCAGTGGCCCGATCTCGGCTC
ACTGCAACCTCCACCTCCCAGGTTCAAGCGATTCTCCTGCCTCAGCCTCC
CGAGTAGCTGGGATTAAGCTGGGATTATAGGCGTGCCCCACCACGCCCGG
CTAGTTTTTGTATTTTTAGTAGAGACGGGGTTTCACTGTGTTGGCCAGGC
TGGTCTCGAACTCCTGACCTCACGTGATCCGCCCTCCTCGGCCTCCCCAA
GTGCTGAGATTACAGGCGTGAGCCACCGCGCCCGCCGCCCCCTGAATTTA
GAGAATAGCGGAGCCTCCCCATTCTCTGCGGCCTTGGCTCCTACACTTCC
CGTGGTAACCTTGTTCATCCGCTGAAGCCCGCTGCTTTTCCCAGCCCGGC
CTCTGGGGGCCGCTGCCGGGCCTGTGAGCCTGTGGACCAGGAGCTCCTGC
TGCCGTCGTAGCGTCACGTCCGGTCTCGGCGGAAGTTTTCCGGCGGCTAC
CGGGAAGTCGCTGAAGACAGAGCGATGGTAGTTCTGGAGGCCTCGCTCCG
GGGCCGACCCGAGGCCACAGTGCCTCCGCGGTAGACCGGACTTGGGTGAC
GGGCTCCGGGCTCCCGAGGTGAAGAGCATCGGGGGCTGAGGTGGGACCTT
AGAAGGGAGTCTGGGAACCCTCACGGCTCTTATTGGAGTCCCTTCCCTGA
CCCTGGGCTCTAAACTGCCTTTGCTCAGGCTGTCCCGGAAGCAGGTCCTC
CCCGTATCATACCATTCCTAGAGGGAACGGCGCAGGTTGGGACTTCCCTC
CCTTTACCATCGTCACCAAGGCATGTGGTAACCCCGGGCCGGAGGTCAAG
GGCGTCGCTTCTCCCTAATGTTGCCTCTTTTCCACGGCCTCAGGGATG

[0302] 3) STAT3. Signal Transducers and Activators of Transcription 3 (STAT3) is a point of convergence for numerous oncogenic signalling pathways, is constitutively activated both in tumor cells and in immune cells in the tumor microenvironment. STAT3 inhibits the expression of mediators necessary for immune activation against tumor cells (Nature Reviews Immunology 7, 41-51; 2007; Proc Natl Acad Sci USA. 2006 Jul. 5; 103(27): 10151-10152) and promotes the production of immunosuppressive factors that further activate STAT3 in diverse immune-cell subsets, altering gene-expression. This restraining anti-tumor immune response and propagation of cross-talk between tumor cells and their immunological microenvironment leads to tumor-induced immunosuppression and enhanced tumor growth. STAT3 belongs to a protein family of transcription factors first characterized for their role in cytokine signaling that contain a site for specific tyrosine phosphorylation, a modification that results in a conformational rearrangement causing it to accumulate in the cell nucleus, bound to enhancer elements of target genes (Nat. Rev. Mol. Cell. Biol. 2002; 3:651-662). STAT3 is a substrate for the catalytic activity of the tyrosine kinase oncoprotein v-Src (Science. 1995; 269:81-83) and that phosphorylated STAT3 accumulated in many human cancers, suggesting that activated STAT3 may act as an oncogene (Cell. 1999; 98:295-303). In a recent issue of PNAS, Kasprzycka et al. (Proc. Natl. Acad. Sci. USA. 2006; 103:9964-9969) provided evidence that activated STAT3 in a tumor cell contributes to both cell survival and impaired immune surveillance by conferring properties of a T lymphocyte regulatory phenotype on a T cell lymphoma. Further it is recognized that STAT3 is stimulated by classic growth-promoting signals, such as activated growth factor receptors as well as a remarkable degree of diversity for the molecular mechanisms at the basis of STAT3 action including some noncanonical mechanisms of tumor progression that apparently do not rely on tyrosine phosphorylation or binding of homodimers to DNA (Cancer Res. 2005; 65:939-947), possibly involving pathways in malignant cells not directly regulating gene expression.

[0303] Isis Pharmaceuticals is developing an antisense against STAT3. In preclinical studies, ISIS-STAT3Rx demonstrated antitumor activity in animal models of human cancer. ISIS-STAT3Rx was tested in a Phase 1 study in patients with solid tumors and lymphoma who have relapsed or were refractory to multiple chemotherapy regimens and in a Phase 2 study in focused patient populations with advanced cancers that have been linked to STAT3 and who have failed all other treatment options with clear responses in patients with advanced cancer who were refractory to prior chemotherapy treatment. STAT3 is implicated in a variety of cancers, including brain, lung, breast, bone, liver and multiple myeloma to promote tumor cell growth and prevents cell death.

[0304] Protein: STAT3 Gene: STAT3 (Homo sapiens, chromosome 17, 40465343-40540513 [NCBI Reference Sequence: NC_{—}000017.10]; start site location: 40540405; strand: negative)

Gene Identification

| | |
|---|---|
| GeneID | 6774 |
| HGNC | 11364 |
| HPRD | 00026 |
| MIM | 102582 |

Targeted Sequences

| | | | Relative upstream location |
|---|---|---|---|
| | | | to gene start site |
| Sequence | Design | | (upstream promoter of the |
| ID No: | ID | Sequence (5′-3′) | two promoters) |
| 984 | ST1 | GGCCGAGGCACGCCGTCATGCA | −18 |
| 985 | ST2 | CCGGCCCTTGGCACCACGTGGTGGCGA | 345 |
| 986 | | TTGTTCCCTCGGCTGCGACGTCG | −135 |
| 987 | | CAGTCTGCGCCGCCGCAGCTCCGG | −92 |
| 988 | | CAGTGCGTGTGCGGTACAGCCG | 45 |
| 989 | | TGTGCTGGCTGTTCCGACAGTTCGGT | 140 |
| 990 | | TAACTACGCTATCCCGTGCGGCC | 1998449 |
| 991 | | TCGCCCAGCCCCAGCCTGGCCGAGGC | −35 |

Hot Zones (Relative upstream location to gene start site)
−200-200
300-400
1998400-1998500

### Examples

[0305] FIG. 14 shows ST1 (21) and ST2 (22), both at 10 μM, demonstrated statistically significant (P<0.05) inhibition compared to the untreated control inhibition values in MDA-MB-231 (human breast cell line). The negative control did not produce a statistically significant difference compared to the untreated control. The STAT3 sequence ST2 (22) fit the independent and dependent DNAi motif claims. The STAT3 sequence ST1 (21) is designed to the coding region of STAT3.

[0306] FIG. 15, which is similar to FIG. 12, shows ST1 (21) and ST2 (22), both at 10 μM, demonstrated statistically significant (P<0.05) inhibition compared to the untreated control inhibition values in DU145 (human prostate cell line). The negative control did not produce statistically significant difference compared to the untreated control. The STAT3 sequence ST2 (22) fit the independent and dependent DNAi motif claims. The STAT3 sequence ST1 (21) is designed to the coding region of STAT3.

[0307] The secondary structures for ST1 and ST2 are shown in FIGS. 16 and 17. Sequence 21 (ST1) is shown in FIG. 16 and Sequence 22 (ST2) is shown in FIG. 17.

Genetic Code (5′ Upstream Region)
(SEQ ID NO: 11952)
CTTCTGCACTTAAGCACACTATACTTTTTTCACCCAAAGTACCAAATCAA
ACTAGTCAGGATACCTACCTTTGTACAATGTCAGACTCCAGTTAATAACT
CCCCTAGGGCAGAGGGCATATGCACTGATTTACTTTGTACAAATTAACCA
GCATCAGGCAATCAGGCCTGTGCCTAACACATAGTAAGCACTCTATGATT
AAACATCAGTGCTTCGGCTCCAAAGTTTTATTTATTTATTTATTTATTTA
TTTTTTTTTTTTTTGAGACGGAGTCTCGCTCTGTCGCCCAGGCTGGAGTG
CAGTGGTGCGATATCGGCTCACTGCAAGCTCCGCCTCCCGAGTTCACGCT
CTTCTCCTGCCTCAGCCTCCCGAGTAGCTGGGACTACAGACGCCCGCCAC
AACGCCCGGCTACTTTTTTTTGTATTTTTAGTAGAGATGGGGTTTCACCG
TGTTAGCCAGGATGGTCTCGATCTCCTGGCCTCGTGATCCGCGCGTCTGG
GCCTCCCAAAGTGCTGGGATTACAGGCGTGAGCCACCGCGCCCGGCGCCC
CGAAAGTTTTAAAAGCTTCCCCTACAAAAGAACAGAACTGAAATTCCTTG
GTCCTGTATTCAATGTCTTTTGTAAGTAATCACTTCTCCCCTACTTACCC
TCCTAGTCTACCGGGCTACCAGGAATTTTTTTTTTTTTTGGAGACAGGGT
CTCACTCTGTCACCCAGGCTGGAGTGCGGTGGCGGGATCACGGCTCACTG
CAGCCTTAACCCCCGGGGCTTGGGTGATCCTCCCACCTTAGTCTCACCAG
TAGCTGGGACTACAGGTCCACGCCACCAGGCCTGGCTAATTTTTTTTATT
TTTAGGGGAGAGGGAGTTTTACCACGTTGCCCAAGCTGGTCTCAAACTCC
TGGGCTCAAGCAATCCTCCTGCCTCAGCCTCCCAAAGTGCTGGGATTACA
GGCATAAACCACCGCAAATTCTTTACACCTATCAAATTCCACCCATTATT
TGGGACCCAGTTGAAATCCCTCTTTGGCAAAAAGACTTTCTAGACAACTC
CAGGCCTCATAACCTCTCCTTTCTCTGAAGATCTGTAGCATTCAGCCTAG
CACTGTCCAATAGAACGTTCTATGATAACAGAAAAGTTCTACATCTGTAC
TGTATGTTCTTTTATGTAGAACAGCTACCTTGTTAGCACAAGTGTAAAGT
CTCACCATCTCTTTGATGACAACATGTTACATTGGATGGTTAAAACATTT
ATCAGCTCCCCCAGTAGACTGCAATTTCTGTGAACAAGATACAACTTATT
CTTCATAGCAACTCTGACAAAGTTGCAAAAGGTATATATATGTTGGCCAG
GCAAGGTGGTTCACGCCTGTAATCCCAGCACTTTGGGAGGCTGAGGTGGG
CAGATCTCTTGAGGTCAGGAGTTTGAGACCAGCCTGGTCAATATAGTGAA
ACCTTATCTCTACTAAAAATACAAAAATTAGCCGGGCGTAGTGGCGGGCA
CCTGTAATCCCAGCTACTCAGGAGGCTGAGGTGCGAGAATCACTTGAACC
CGGGAGGAGGAGGTTGCAGTGAGCCACGATCATGCCACTGCACTCCAGCC
TGGGTGATAGAGTGCAACTCCAACTCAAAAAAAAAAAAAAAAAAGTATAT
ATTTGTTGATTTGCACATCACCTAAGAAAACCATAAGCTAAGAAGGTTTG
GACTCAGGCGTCTGGAAAGTTGGTCACCACCTCTACCCCACCTCATATCT
GAATGTCAAGAGACACGTAGAGGCAGAGAAGTTAAAGCAACTTTCTAGAG
ACAGAAATGACCACTGATCAAGCCACAATGCACTCTGGTTTAAATGACAT
TTAGGTCATGACTGTCCTTAATCTAAAACAAACCTAGATTAGTATTTCTT
TTCATTAGTAAATAGCTAAATTCTGATGGTAAATTATGCTGACCAAAAAC
AGTTCCTCACTTCCCAAGTTAGACATAGCAATTAGAAAAATAATCTAAGC
AAGCTCCATTTGTATTTCTTTTTTCACCTGTTTATTGAATATTTACCTCC
CATGAAGTCTTTCAGCCTATTGGTGGTATTTTACTGTTCAGATATATGTT
AGAATTTCACTGATACTTACTGGGCGCGGTGGCTCACACCTGTAATCCCA
GCACTTTGGGAGATAGAGGTGGGCAAATCACAAGGTCAGGAGTTCAAGAC
CAGCCTGGCCAATATGGTAAAACCCCGGTCTCTACTAAAAATACAAAAAT
TAGCTGGGCGTGGTGGCGCACGCCTGTAGTCCCAGCTACTTGGGAGGCTG
AGGCAGGAGAATCGCTTGAACCCAGGAGGCAGAGGTTGCAGTGAGCCAAG
ATTGCGCCACTGCACTCTAGCCTGGGCAACAGAGCAAGACTCTGACTCAA
AAAAAAAAAAAAAAAGAATTTCACTGATACTTTTCACAAAATATACAGAA
GGAGGCACAAATTCCACCACTATGGCACTCTGCTGCGTTGGCCAAGTGTC
TTGATCCTTTGGCCTCAATTTTCTTATCTACGATATTAGGGTAATTGTTA
TGTGAACTACCCACCTCACAAGTCCTTTGTGGGTTAATTCATAACTGTGC
TGTGGGTATTTCTTTTTCTTTCCTTTCTTCCTCCTTTCCTTTCTTTCTTT
CTTAAAGATGGGTTCTCATTATGGTGCTTAGACTAGACTCTAGACCCAAT
TCCTGGCCTCTCACCATGTTGCCCAGACCAGACTCAACTCCTGGACTCAA
GGAATCCTCCCACCTCAGCCTTCAATTAGCTGGGATCAGAGGTGTGCACC
ACCATGCCTGGCACTGTGGATATTTCTAAGTGATTATTCTTCTCAAATGA
ACTACATAAAAAACAAAAGATTCATGAATTTACTAATGGTTCTTTGTGAT
GGATGTGCTAATATAGAGACTAAAATCAAGGCTCCAACCTCTAAAACATT
TTTTTTTAAATTCCAGACTTGTTTCCCCATCCCACTGTGCAAACTGAACA
AAAACTGGGCTAGCACTCCTGTCTGGAACATGTAATAAGGAAATAAATGT
GCTGACTCAGAGAACACAGACATATTTAATATAAAATAAGATAGAAAACT
GGCTGAACCAAGTCATAACACAGTCTAAATCCACATATAAAAGATTGAGA
TGATTTTCTGCTTTGCTTTATTCAAGCCCAATGCTTTATCAGCACAGCCA
GCCAAAAATTTACAACCCATACACAGACTATGTAAACCTTTAGTTGCACA
TACAGTAAGACCAGCAGGTACACACTATACACATTTTTAATTAAAAAAAT
GACTAACCACTGATTTTGTCACCACACTTAACAACGACCTGATATGGCAC
AGAGTGATGTGTACCAAACATGGAAATACCAACTTGGGCGACGGTTTGAA
TCTTGTTAACTTCAGTGCAACCACACCCCCCAAATGCATGTAAAGTTTGC
ACACATGGTTTTTTCAAGGCCAGCCTGTCTTTGTTTCCCTCTCCTCTGCA
TTTACCCAAGATCTTGGCTCTGAGACAGAAAACTCCCACTCTCAATTGGT
TCATTCCGTCCTATGCAATTAAGCAACACCACAATCCAGTAAATGCAATG
GCTCAATTATTTATCTTCTGGCCGACTTTACCAGGTATTTGGAAAAGGAC
AATGTCAAGAGGTTTATTTCTCTCTCTAGAGCTGGCTTGACGGGTTGATG
GGGATTTTATTTTGTCTTTTTTTCTCTTTTTTACAAGGCGGGGACGTGGG
GGGAGCATAATTTAACCTAGAAAAAGATGCGAGGGAATTTAGAAAGAGTA
CCGGTCTGTCAATTTCCCTACAGGAAACTTGATTCTTATGCAATAAAGCC
TACCCACGACCAGCCAGCCCGTAAGGCTGCAGGCGACAGACACACCTATT
CCTGCCTCCAAAAGGGCACAGCTGTCTCCTGAAGGAGCGGGAACAGGGCA
AGCGGAGGAAGTGGCTCAGCGGGAGCCGCCGACCGGGCGGGGAGGAGGCG
CTTTCCGACCCCCCACTCGCGCCGGTGATCCCCGTCGGCGTGACAGTCGC
TCCGGTGGCCGGAACGTCCCCAGGGCCCCAGGGAGCAGGAAATCGGGGGA
CTGTCCCTCACTCCTGCCGCCGCAACCGAGTGCGCCCTCGCCCCACGGTG
CCCCCTCGAGCGCGTTCTGTTTCTCCGAAGAACGAAACTTCCCTCCAGCG
CCCCGAGTCCCTTCCGAGGCCCGCTCCTGTCATCCCGAAGAGTCTTCCCT
CAGGGCGACCCTCCGCGTCTCTTCATCTCTCCCGGCCCCACTGCAGCGTC
CATCACAACATCCCCAAGGTCCCAGAGGCCCCCTGCCGCTGCGGAGCCCC
CGGGTCCCCAGGCCTCCCCAACGGCCCCACCCTGCACCCCCTTCACCTGT
TTCTCCGGCAGAGGCCGAGAGGCCGGGGCTGCGCGTGTGCCGGGGACGGG
CGGCGAGGCTCCCTCAGGCCGAAGGGCCTCTCCGAGCCGAGGGGGAGAGA
CAGCGCC

[0308] 4) HIF1A. Hypoxia-inducible factors (HIFs) are transcription factors that respond to changes in available oxygen in the cellular environment, specifically, to decreases in oxygen, or hypoxia. Hypoxia-inducible factor-1 (HIF-1a) is the alpha subunit of the HIF-1 dimeric transcriptional complex involved in the maintenance of oxygen and energy homoeostasis. Hypoxia often keeps cells from differentiating. However, hypoxia promotes the formation of blood vessels, and is important for the formation of a vascular system in embryos, and cancer tumors. The HIF-1 alpha subunit is oxygen labile and is degraded by the proteasome following prolyl-hydroxylation and ubiquitination in normoxic cells. There is also evidence that HIF-1 is also involved in immune reactions (Hurwig-Burgel et al, J Interferon Cytokine Res. 2005; 25(6):297-310). Immunomodulatory peptides, including interleukin-1 (IL-1) and tumor necrosis factor-alpha (TNF-alpha), stimulate HIF-1 dependent gene expression even in normoxic cells. Both the hypoxic and the cytokine-induced activation of HIF-1 involve the phosphatidylinositol-3-kinase (PI3K) and the mitogen-activated protein kinase (MAPK) signaling pathways. In addition, heat shock proteins (HSP) and other cofactors interact with HIF-1 subunits. HIF-1 blockade may be beneficial to prevent tumor angiogenesis and tumor growth.

[0309] Protein: HIF1A Gene: HIF1A (Homo sapiens, chromosome 14, 62162119-62214977 [NCBI Reference Sequence: NC_{—}000014.8]; start site location: 62162523; strand: positive)

Gene Identification

| | |
|---|---|
| GeneID | 3091 |
| HGNC | 4910 |
| HPRD | 04517 |
| MIM | 603348 |

Targeted Sequences

| | | | Relative upstream |
|---|---|---|---|
| Sequence | | | location to gene start |
| ID No: | Design ID | Sequence (5′-3′) | site |
| 992 | HI1 | CAGGCCGGCGCGCGCTCCCGCAA | 390 |
| 1048 | HI2 | GGACGGGCTGCGACGCTCACGTGC | 539 |
| 1089 | | GAGGTGGGGGTGCGAGGCGGGAAACCC | 108 |
| | | CTCG | |
| 1090 | | CAATCGCCGGGGTCCGGGCCCGGC | 162 |
| 1129 | | TGGCCGAAGCGACGAAGAGGG | 232 |
| 1130 | | GGGCGGAGGCGCGCTCGGGCGCG | 325 |
| 1142 | | CACGGCGGGCGGCCCCCAGGCTCGC | 26 |
| 1214 | | CAGGCCGGCGCGCGCTCCCGCAAGCCCG | 390 |
| 1270 | | CGATTGCCGCCCAACTCTGCTGGG | 789 |

Target Shift Sequences

| | | Relative |
|---|---|---|
| | | upstream |
| | | location to |
| Sequence | | gene start |
| ID No: | Sequence (5′-3′) | site |
| 992 | CAGGCCGGCGCGCGCTCCCGCAA | 390 |
| 993 | AGGCCGGCGCGCGCTCCCGC | 391 |
| 994 | GGCCGGCGCGCGCTCCCGCA | 392 |
| 995 | GCCGGCGCGCGCTCCCGCAA | 393 |
| 996 | CCGGCGCGCGCTCCCGCAAG | 394 |
| 997 | CGGCGCGCGCTCCCGCAAGC | 395 |
| 998 | GGCGCGCGCTCCCGCAAGCC | 396 |
| 999 | GCGCGCGCTCCCGCAAGCCC | 397 |
| 1000 | CGCGCGCTCCCGCAAGCCCG | 398 |
| 1001 | GCGCGCTCCCGCAAGCCCGC | 399 |
| 1002 | CGCGCTCCCGCAAGCCCGCC | 400 |
| 1003 | GCGCTCCCGCAAGCCCGCCT | 401 |
| 1004 | CGCTCCCGCAAGCCCGCCTC | 402 |
| 1005 | GCTCCCGCAAGCCCGCCTCA | 403 |
| 1006 | CTCCCGCAAGCCCGCCTCAC | 404 |
| 1007 | TCCCGCAAGCCCGCCTCACC | 405 |
| 1008 | CCCGCAAGCCCGCCTCACCT | 406 |
| 1009 | CCGCAAGCCCGCCTCACCTG | 407 |
| 1010 | CGCAAGCCCGCCTCACCTGA | 408 |
| 1011 | GCAAGCCCGCCTCACCTGAG | 409 |
| 1012 | CAAGCCCGCCTCACCTGAGG | 410 |
| 1013 | AAGCCCGCCTCACCTGAGGT | 411 |
| 1014 | AGCCCGCCTCACCTGAGGTG | 412 |
| 1015 | GCCCGCCTCACCTGAGGTGG | 413 |
| 1016 | CCCGCCTCACCTGAGGTGGA | 414 |
| 1017 | CCGCCTCACCTGAGGTGGAG | 415 |
| 1018 | CGCCTCACCTGAGGTGGAGG | 416 |
| 1019 | CCAGGCCGGCGCGCGCTCCC | 389 |
| 1020 | CCCAGGCCGGCGCGCGCTCC | 388 |
| 1021 | GCCCAGGCCGGCGCGCGCTC | 387 |
| 1022 | TGCCCAGGCCGGCGCGCGCT | 386 |
| 1023 | CTGCCCAGGCCGGCGCGCGC | 385 |
| 1024 | CCTGCCCAGGCCGGCGCGCG | 384 |
| 1025 | GCCTGCCCAGGCCGGCGCGC | 383 |
| 1026 | CGCCTGCCCAGGCCGGCGCG | 382 |
| 1027 | TCGCCTGCCCAGGCCGGCGC | 381 |
| 1028 | CTCGCCTGCCCAGGCCGGCG | 380 |
| 1029 | GCTCGCCTGCCCAGGCCGGC | 379 |
| 1030 | CGCTCGCCTGCCCAGGCCGG | 378 |
| 1031 | CCGCTCGCCTGCCCAGGCCG | 377 |
| 1032 | CCCGCTCGCCTGCCCAGGCC | 376 |
| 1033 | GCCCGCTCGCCTGCCCAGGC | 375 |
| 1034 | CGCCCGCTCGCCTGCCCAGG | 374 |
| 1035 | GCGCCCGCTCGCCTGCCCAG | 373 |
| 1036 | CGCGCCCGCTCGCCTGCCCA | 372 |
| 1037 | GCGCGCCCGCTCGCCTGCCC | 371 |
| 1038 | AGCGCGCCCGCTCGCCTGCC | 370 |
| 1039 | GAGCGCGCCCGCTCGCCTGC | 369 |
| 1040 | GGAGCGCGCCCGCTCGCCTG | 368 |
| 1041 | GGGAGCGCGCCCGCTCGCCT | 367 |
| 1042 | CGGGAGCGCGCCCGCTCGCC | 366 |
| 1043 | GCGGGAGCGCGCCCGCTCGC | 365 |
| 1044 | GGCGGGAGCGCGCCCGCTCG | 364 |
| 1045 | GGGCGGGAGCGCGCCCGCTC | 363 |
| 1046 | GGGGCGGGAGCGCGCCCGCT | 362 |
| 1047 | GGGGGCGGGAGCGCGCCCGC | 361 |
| 1048 | GGACGGGCTGCGACGCTCACGTGC | 539 |
| 1049 | GACGGGCTGCGACGCTCACG | 540 |
| 1050 | ACGGGCTGCGACGCTCACGT | 541 |
| 1051 | CGGGCTGCGACGCTCACGTG | 542 |
| 1052 | GGGCTGCGACGCTCACGTGC | 543 |
| 1053 | GGCTGCGACGCTCACGTGCT | 544 |
| 1054 | GCTGCGACGCTCACGTGCTC | 545 |
| 1055 | CTGCGACGCTCACGTGCTCG | 546 |
| 1056 | TGCGACGCTCACGTGCTCGT | 547 |
| 1057 | GCGACGCTCACGTGCTCGTC | 548 |
| 1058 | CGACGCTCACGTGCTCGTCT | 549 |
| 1059 | GACGCTCACGTGCTCGTCTG | 550 |
| 1060 | ACGCTCACGTGCTCGTCTGT | 551 |
| 1061 | CGCTCACGTGCTCGTCTGTG | 552 |
| 1062 | GCTCACGTGCTCGTCTGTGT | 553 |
| 1063 | CTCACGTGCTCGTCTGTGTT | 554 |
| 1064 | TCACGTGCTCGTCTGTGTTT | 555 |
| 1065 | CACGTGCTCGTCTGTGTTTA | 556 |
| 1066 | ACGTGCTCGTCTGTGTTTAG | 557 |
| 1067 | CGTGCTCGTCTGTGTTTAGC | 558 |
| 1068 | GTGCTCGTCTGTGTTTAGCG | 559 |
| 1069 | TGCTCGTCTGTGTTTAGCGG | 560 |
| 1070 | GCTCGTCTGTGTTTAGCGGC | 561 |
| 1071 | CTCGTCTGTGTTTAGCGGCG | 562 |
| 1072 | TCGTCTGTGTTTAGCGGCGG | 563 |
| 1073 | CGTCTGTGTTTAGCGGCGGA | 564 |
| 1074 | GTCTGTGTTTAGCGGCGGAG | 565 |
| 1075 | TCTGTGTTTAGCGGCGGAGG | 566 |
| 1076 | CTGTGTTTAGCGGCGGAGGA | 567 |
| 1077 | TGTGTTTAGCGGCGGAGGAA | 568 |
| 1078 | GGGACGGGCTGCGACGCTCA | 538 |
| 1079 | TGGGACGGGCTGCGACGCTC | 537 |
| 1080 | CTGGGACGGGCTGCGACGCT | 536 |
| 1081 | GCTGGGACGGGCTGCGACGC | 535 |
| 1082 | AGCTGGGACGGGCTGCGACG | 534 |
| 1083 | CAGCTGGGACGGGCTGCGAC | 533 |
| 1084 | ACAGCTGGGACGGGCTGCGA | 532 |
| 1085 | CACAGCTGGGACGGGCTGCG | 531 |
| 1086 | GCACAGCTGGGACGGGCTGC | 530 |
| 1087 | GGCACAGCTGGGACGGGCTG | 529 |
| 1088 | AGGCACAGCTGGGACGGGCT | 528 |
| 1089 | GAGGTGGGGGTGCGAGGCGGGAAACCCCTCG | 108 |
| 1090 | CAATCGCCGGGGTCCGGGCCCGGC | 162 |
| 1091 | AATCGCCGGGGTCCGGGCCC | 163 |
| 1092 | ATCGCCGGGGTCCGGGCCCG | 164 |
| 1093 | TCGCCGGGGTCCGGGCCCGG | 165 |
| 1094 | CGCCGGGGTCCGGGCCCGGC | 166 |
| 1095 | GCCGGGGTCCGGGCCCGGCT | 167 |
| 1096 | CCGGGGTCCGGGCCCGGCTC | 168 |
| 1097 | CGGGGTCCGGGCCCGGCTCC | 169 |
| 1098 | GGGGTCCGGGCCCGGCTCCG | 170 |
| 1099 | GGGTCCGGGCCCGGCTCCGA | 171 |
| 1100 | GGTCCGGGCCCGGCTCCGAG | 172 |
| 1101 | GTCCGGGCCCGGCTCCGAGC | 173 |
| 1102 | TCCGGGCCCGGCTCCGAGCC | 174 |
| 1103 | CCGGGCCCGGCTCCGAGCCT | 175 |
| 1104 | CGGGCCCGGCTCCGAGCCTC | 176 |
| 1105 | GGGCCCGGCTCCGAGCCTCT | 177 |
| 1106 | GGCCCGGCTCCGAGCCTCTC | 178 |
| 1107 | GCCCGGCTCCGAGCCTCTCC | 179 |
| 1108 | CCCGGCTCCGAGCCTCTCCT | 180 |
| 1109 | CCGGCTCCGAGCCTCTCCTC | 181 |
| 1110 | CGGCTCCGAGCCTCTCCTCA | 182 |
| 1111 | GGCTCCGAGCCTCTCCTCAG | 183 |
| 1112 | GCTCCGAGCCTCTCCTCAGG | 184 |
| 1113 | CTCCGAGCCTCTCCTCAGGT | 185 |
| 1114 | TCCGAGCCTCTCCTCAGGTG | 186 |
| 1115 | CCGAGCCTCTCCTCAGGTGG | 187 |
| 1116 | CGAGCCTCTCCTCAGGTGGC | 188 |
| 1117 | GCAATCGCCGGGGTCCGGGC | 161 |
| 1118 | GGCAATCGCCGGGGTCCGGG | 160 |
| 1119 | CGGCAATCGCCGGGGTCCGG | 159 |
| 1120 | GCGGCAATCGCCGGGGTCCG | 158 |
| 1121 | GGCGGCAATCGCCGGGGTCC | 157 |
| 1122 | GGGCGGCAATCGCCGGGGTC | 156 |
| 1123 | CGGGCGGCAATCGCCGGGGT | 155 |
| 1124 | GCGGGCGGCAATCGCCGGGG | 154 |
| 1125 | AGCGGGCGGCAATCGCCGGG | 153 |
| 1126 | AAGCGGGCGGCAATCGCCGG | 152 |
| 1127 | GAAGCGGGCGGCAATCGCCG | 151 |
| 1128 | AGAAGCGGGCGGCAATCGCC | 150 |
| 1129 | TGGCCGAAGCGACGAAGAGGG | 232 |
| 1130 | GGGCGGAGGCGCGCTCGGGCGCG | 325 |
| 1131 | GGCGGAGGCGCGCTCGGGCG | 326 |
| 1132 | GCGGAGGCGCGCTCGGGCGC | 327 |
| 1133 | CGGAGGCGCGCTCGGGCGCG | 328 |
| 1134 | GGAGGCGCGCTCGGGCGCGC | 329 |
| 1135 | GAGGCGCGCTCGGGCGCGCG | 330 |
| 1136 | AGGCGCGCTCGGGCGCGCGG | 331 |
| 1137 | GGCGCGCTCGGGCGCGCGGG | 332 |
| 1138 | GCGCGCTCGGGCGCGCGGGG | 333 |
| 1139 | CGCGCTCGGGCGCGCGGGGA | 334 |
| 1140 | GCGCTCGGGCGCGCGGGGAG | 335 |
| 1141 | CGCTCGGGCGCGCGGGGAGG | 336 |
| 1142 | CACGGCGGGCGGCCCCCAGGCTCGC | 26 |
| 1143 | ACGGCGGGCGGCCCCCAGGC | 27 |
| 1144 | CGGCGGGCGGCCCCCAGGCT | 28 |
| 1145 | GGCGGGCGGCCCCCAGGCTC | 29 |
| 1146 | GCGGGCGGCCCCCAGGCTCG | 30 |
| 1147 | CGGGCGGCCCCCAGGCTCGC | 31 |
| 1148 | GGGCGGCCCCCAGGCTCGCT | 32 |
| 1149 | GGCGGCCCCCAGGCTCGCTC | 33 |
| 1150 | GCGGCCCCCAGGCTCGCTCC | 34 |
| 1151 | CGGCCCCCAGGCTCGCTCCG | 35 |
| 1152 | GGCCCCCAGGCTCGCTCCGG | 36 |
| 1153 | GCCCCCAGGCTCGCTCCGGC | 37 |
| 1154 | CCCCCAGGCTCGCTCCGGCC | 38 |
| 1155 | CCCCAGGCTCGCTCCGGCCT | 39 |
| 1156 | CCCAGGCTCGCTCCGGCCTA | 40 |
| 1157 | CCAGGCTCGCTCCGGCCTAA | 41 |
| 1158 | CAGGCTCGCTCCGGCCTAAG | 42 |
| 1159 | AGGCTCGCTCCGGCCTAAGC | 43 |
| 1160 | GGCTCGCTCCGGCCTAAGCG | 44 |
| 1161 | GCTCGCTCCGGCCTAAGCGC | 45 |
| 1162 | CTCGCTCCGGCCTAAGCGCT | 46 |
| 1163 | TCGCTCCGGCCTAAGCGCTG | 47 |
| 1164 | CGCTCCGGCCTAAGCGCTGG | 48 |
| 1165 | GCTCCGGCCTAAGCGCTGGC | 49 |
| 1166 | CTCCGGCCTAAGCGCTGGCT | 50 |
| 1167 | TCCGGCCTAAGCGCTGGCTC | 51 |
| 1168 | CCGGCCTAAGCGCTGGCTCC | 52 |
| 1169 | CGGCCTAAGCGCTGGCTCCC | 53 |
| 1170 | GGCCTAAGCGCTGGCTCCCT | 54 |
| 1171 | GCCTAAGCGCTGGCTCCCTC | 55 |
| 1172 | CCTAAGCGCTGGCTCCCTCC | 56 |
| 1173 | CTAAGCGCTGGCTCCCTCCA | 57 |
| 1174 | TAAGCGCTGGCTCCCTCCAC | 58 |
| 1175 | AAGCGCTGGCTCCCTCCACA | 59 |
| 1176 | AGCGCTGGCTCCCTCCACAC | 60 |
| 1177 | GCGCTGGCTCCCTCCACACG | 61 |
| 1178 | CGCTGGCTCCCTCCACACGC | 62 |
| 1179 | GCTGGCTCCCTCCACACGCG | 63 |
| 1180 | CTGGCTCCCTCCACACGCGG | 64 |
| 1181 | TGGCTCCCTCCACACGCGGA | 65 |
| 1182 | GGCTCCCTCCACACGCGGAG | 66 |
| 1183 | GCTCCCTCCACACGCGGAGA | 67 |
| 1184 | CTCCCTCCACACGCGGAGAA | 68 |
| 1185 | TCCCTCCACACGCGGAGAAG | 69 |
| 1186 | CCCTCCACACGCGGAGAAGA | 70 |
| 1187 | CCTCCACACGCGGAGAAGAG | 71 |
| 1188 | CTCCACACGCGGAGAAGAGA | 72 |
| 1189 | TCACGGCGGGCGGCCCCCAG | 25 |
| 1190 | TTCACGGCGGGCGGCCCCCA | 24 |
| 1191 | CTTCACGGCGGGCGGCCCCC | 23 |
| 1192 | TCTTCACGGCGGGCGGCCCC | 22 |
| 1193 | GTCTTCACGGCGGGCGGCCC | 21 |
| 1194 | TGTCTTCACGGCGGGCGGCC | 20 |
| 1195 | ATGTCTTCACGGCGGGCGGC | 19 |
| 1196 | GATGTCTTCACGGCGGGCGG | 18 |
| 1197 | CGATGTCTTCACGGCGGGCG | 17 |
| 1198 | GCGATGTCTTCACGGCGGGC | 16 |
| 1199 | CGCGATGTCTTCACGGCGGG | 15 |
| 1200 | CCGCGATGTCTTCACGGCGG | 14 |
| 1201 | CCCGCGATGTCTTCACGGCG | 13 |
| 1202 | CCCCGCGATGTCTTCACGGC | 12 |
| 1203 | TCCCCGCGATGTCTTCACGG | 11 |
| 1204 | GTCCCCGCGATGTCTTCACG | 10 |
| 1205 | GGTCCCCGCGATGTCTTCAC | 9 |
| 1206 | CGGTCCCCGCGATGTCTTCA | 8 |
| 1207 | TCGGTCCCCGCGATGTCTTC | 7 |
| 1208 | ATCGGTCCCCGCGATGTCTT | 6 |
| 1209 | AATCGGTCCCCGCGATGTCT | 5 |
| 1210 | GAATCGGTCCCCGCGATGTC | 4 |
| 1211 | TGAATCGGTCCCCGCGATGT | 3 |
| 1212 | GTGAATCGGTCCCCGCGATG | 2 |
| 1213 | GGTGAATCGGTCCCCGCGAT | 1 |
| 1214 | CAGGCCGGCGCGCGCTCCCGCAAGCCCG | 390 |
| 1215 | AGGCCGGCGCGCGCTCCCGC | 391 |
| 1216 | GGCCGGCGCGCGCTCCCGCA | 392 |
| 1217 | GCCGGCGCGCGCTCCCGCAA | 393 |
| 1218 | CCGGCGCGCGCTCCCGCAAG | 394 |
| 1219 | CGGCGCGCGCTCCCGCAAGC | 395 |
| 1220 | GGCGCGCGCTCCCGCAAGCC | 396 |
| 1221 | GCGCGCGCTCCCGCAAGCCC | 397 |
| 1222 | CGCGCGCTCCCGCAAGCCCG | 398 |
| 1223 | GCGCGCTCCCGCAAGCCCGC | 399 |
| 1224 | CGCGCTCCCGCAAGCCCGCC | 400 |
| 1225 | GCGCTCCCGCAAGCCCGCCT | 401 |
| 1226 | CGCTCCCGCAAGCCCGCCTC | 402 |
| 1227 | GCTCCCGCAAGCCCGCCTCA | 403 |
| 1228 | CTCCCGCAAGCCCGCCTCAC | 404 |
| 1229 | TCCCGCAAGCCCGCCTCACC | 405 |
| 1230 | CCCGCAAGCCCGCCTCACCT | 406 |
| 1231 | CCGCAAGCCCGCCTCACCTG | 407 |
| 1232 | CGCAAGCCCGCCTCACCTGA | 408 |
| 1233 | GCAAGCCCGCCTCACCTGAG | 409 |
| 1234 | CAAGCCCGCCTCACCTGAGG | 410 |
| 1235 | AAGCCCGCCTCACCTGAGGT | 411 |
| 1236 | AGCCCGCCTCACCTGAGGTG | 412 |
| 1237 | GCCCGCCTCACCTGAGGTGG | 413 |
| 1238 | CCCGCCTCACCTGAGGTGGA | 414 |
| 1239 | CCGCCTCACCTGAGGTGGAG | 415 |
| 1240 | CGCCTCACCTGAGGTGGAGG | 416 |
| 1241 | CCAGGCCGGCGCGCGCTCCC | 389 |
| 1242 | CCCAGGCCGGCGCGCGCTCC | 388 |
| 1243 | GCCCAGGCCGGCGCGCGCTC | 387 |
| 1244 | TGCCCAGGCCGGCGCGCGCT | 386 |
| 1245 | CTGCCCAGGCCGGCGCGCGC | 385 |
| 1246 | CCTGCCCAGGCCGGCGCGCG | 384 |
| 1247 | GCCTGCCCAGGCCGGCGCGC | 383 |
| 1248 | CGCCTGCCCAGGCCGGCGCG | 382 |
| 1249 | TCGCCTGCCCAGGCCGGCGC | 381 |
| 1250 | CTCGCCTGCCCAGGCCGGCG | 380 |
| 1251 | GCTCGCCTGCCCAGGCCGGC | 379 |
| 1252 | CGCTCGCCTGCCCAGGCCGG | 378 |
| 1253 | CCGCTCGCCTGCCCAGGCCG | 377 |
| 1254 | CCCGCTCGCCTGCCCAGGCC | 376 |
| 1255 | GCCCGCTCGCCTGCCCAGGC | 375 |
| 1256 | CGCCCGCTCGCCTGCCCAGG | 374 |
| 1257 | GCGCCCGCTCGCCTGCCCAG | 373 |
| 1258 | CGCGCCCGCTCGCCTGCCCA | 372 |
| 1259 | GCGCGCCCGCTCGCCTGCCC | 371 |
| 1260 | AGCGCGCCCGCTCGCCTGCC | 370 |
| 1261 | GAGCGCGCCCGCTCGCCTGC | 369 |
| 1262 | GGAGCGCGCCCGCTCGCCTG | 368 |
| 1263 | GGGAGCGCGCCCGCTCGCCT | 367 |
| 1264 | CGGGAGCGCGCCCGCTCGCC | 366 |
| 1265 | GCGGGAGCGCGCCCGCTCGC | 365 |
| 1266 | GGCGGGAGCGCGCCCGCTCG | 364 |
| 1267 | GGGCGGGAGCGCGCCCGCTC | 363 |
| 1268 | GGGGCGGGAGCGCGCCCGCT | 362 |
| 1269 | GGGGGCGGGAGCGCGCCCGC | 361 |
| 1270 | CGATTGCCGCCCAACTCTGCTGGG | 789 |
| 1271 | GATTGCCGCCCAACTCTGCT | 790 |
| 1272 | ATTGCCGCCCAACTCTGCTG | 791 |
| 1273 | TTGCCGCCCAACTCTGCTGG | 792 |
| 1274 | TGCCGCCCAACTCTGCTGGG | 793 |
| 1275 | GCCGCCCAACTCTGCTGGGC | 794 |
| 1276 | CCGCCCAACTCTGCTGGGCT | 795 |
| 1277 | CGCCCAACTCTGCTGGGCTC | 796 |
| 1278 | ACGATTGCCGCCCAACTCTG | 788 |
| 1279 | CACGATTGCCGCCCAACTCT | 787 |
| 1280 | GCACGATTGCCGCCCAACTC | 786 |
| 1281 | GGCACGATTGCCGCCCAACT | 785 |
| 1282 | GGGCACGATTGCCGCCCAAC | 784 |
| 1283 | TGGGCACGATTGCCGCCCAA | 783 |
| 1284 | CTGGGCACGATTGCCGCCCA | 782 |
| 1285 | GCTGGGCACGATTGCCGCCC | 781 |
| 1286 | TGCTGGGCACGATTGCCGCC | 780 |
| 1287 | GTGCTGGGCACGATTGCCGC | 779 |
| 1288 | AGTGCTGGGCACGATTGCCG | 778 |
| 1289 | CAGTGCTGGGCACGATTGCC | 777 |
| 1290 | TCAGTGCTGGGCACGATTGC | 776 |
| 1291 | CTCAGTGCTGGGCACGATTG | 775 |
| 1292 | CCTCAGTGCTGGGCACGATT | 774 |
| 1293 | GCCTCAGTGCTGGGCACGAT | 773 |
| 1294 | GGCCTCAGTGCTGGGCACGA | 772 |
| 1295 | CGGCCTCAGTGCTGGGCACG | 771 |
| 1296 | TCGGCCTCAGTGCTGGGCAC | 770 |
| 1297 | CTCGGCCTCAGTGCTGGGCA | 769 |
| 1298 | CCTCGGCCTCAGTGCTGGGC | 768 |
| 1299 | TCCTCGGCCTCAGTGCTGGG | 767 |
| 1300 | CTCCTCGGCCTCAGTGCTGG | 766 |
| 1301 | TCTCCTCGGCCTCAGTGCTG | 765 |
| 1302 | TTCTCCTCGGCCTCAGTGCT | 764 |
| 1303 | TTTCTCCTCGGCCTCAGTGC | 763 |
| 1304 | CTTTCTCCTCGGCCTCAGTG | 762 |
| 1305 | TCTTTCTCCTCGGCCTCAGT | 761 |
| 1306 | CTCTTTCTCCTCGGCCTCAG | 760 |
| 1307 | TCTCTTTCTCCTCGGCCTCA | 759 |
| 1308 | CTCTCTTTCTCCTCGGCCTC | 758 |
| 1309 | GCTCTCTTTCTCCTCGGCCT | 757 |
| 1310 | TGCTCTCTTTCTCCTCGGCC | 756 |
| 1311 | CTGCTCTCTTTCTCCTCGGC | 755 |
| 1312 | CCTGCTCTCTTTCTCCTCGG | 754 |
| 1313 | TCCTGCTCTCTTTCTCCTCG | 753 |

Hot Zones (Relative upstream location to gene start site)
1-1050
1500-1700
2000-2450

[0310] FIG. 18 shows MDA-MB-231 (human breast cell line), HI1 (31) and HI2 (32) at 10 μM showed increased inhibition compared to the untreated control and the negative control. The HIF1A sequences HI1 (31) and HI2 (32) (shown below) fit the independent and dependent DNAi motif claims.

[0311] FIG. 19 shows DU145 (human prostate cell line), HI1 (31) and HI2 (32) at 10 μM produced statistically significant (P<0.05) inhibition compared to the untreated control values. The negative control inhibition values did not a produce statistically significant difference compared to the untreated control values. The HIF1A sequences HI1 (31) and HI2 (32) (shown below) fit the independent and dependent DNAi motif claims.

[0312] The secondary structures for HI1 and HI2 are shown in FIGS. 20 and 21. Sequence 31 (HI1) is shown in FIG. 20 and Sequence 32 (HI2) is shown in FIG. 21.

Genetic Code (5′ Upstream Region)
(SEQ ID NO: 11953)
GTTTCCCTTGAGGCCAGGTCTTGTTAAGAAGAACAGAGAGCCCTGAGAGT
ATTTCACGATGGTTACTTACCCCTTCTCCCTGGCAAAAGCAAAGCAGATT
TTTCTCAGATCTTTACAGTGAGAATCTGACAGGATTCACAGAGGTAAAAC
TGAGGTAAGTATTGAGGCCCCTCTCAGACTGAGCCTCCTTGGAGTTTTTT
AACTCTCAAGCTAGTCTGCACTGAGCCTCCAGCAATTCCCCAATTACAGT
TTAGTGTTCCTACTGATGTTGGCTCCAGCTGTGAAACTAGCTTCAGCTTC
TGGCTTCTGTGCCTGGGCTCTGCTCCTGGTAAACTGTGATTCTCTGAAAA
GCTGTGATTCTCTGTATCTATCTGTCTGTCTCTCTAGTTTTTAGGGCAGT
GGTTTTTCCTGTGACCTCAATTCTCTGGTGGATCTAAGAAGAGTTACTGA
TTTCAGTTTGCTTAGCTTTTTTTTTTCTTGTTGTGAGGATGGGAGTGACA
ACTTCCAAGCTCTTTACATGTTGAACAGGAAACTGAAAGCCCCTTGGTGT
TCCTTTGTAAATTCATCTTAAAAATATTTATCATAATTGAAAAGTGCTAA
TATCAAATTTTCAGTCTGTTTATATTCCCCCTAAACTCAGATAAATATAC
ATTTTATTTTGTGTGTCTGTGTGTGTGGGTTTTGTTGTTGTTTGTTTTTT
GTGTTTTTTTTTAAGATATAGGGTCTTGCTCTGTCAAGGCTGGAGTGCAG
TGGCACAATCGTACATCTCTGCAGCCTCGAACTCCTGGGAGAAAGTGATC
CTCCCGCTTTAGCCTTCAGAGTAGCTACGACTACAGGCACTAACCACCAA
GCCCAGCTAATTTTTAAAATTTTTTGTAGAGATGGGAGTTTCACTTTGTT
GCCCAGGCTGGTCTCAAACTCTTGGCCTCAAGTGATCCTCCTGCCTCAGC
CTCCCAAAATGTTGGAATCACAGATACTTTGTGTCTTGATTCTTGAAAGG
AAAAAACAAAGATTTTTAATGCCTCTTATCTTGTACGCACTTTCCTTCCA
AACAATACCCTTTTGCTGCCATTGTTCTCGTTATGAATAGCTTAAAGAAA
AAGAAACAACTAAGGGTAGTAATAGGCCAGGAATCACTTACTGAATACTA
GGTCTTCTTGTATAGTTTGATACCCTATAAATTGTGTGCATCTGATGCAT
TTCACCTTCAAAAGGCTCAATGCTCTGTATTATTTAGTAGTAATCAAAAT
TTCAAGTTTTACTTAACCTCCTGATTCACTGCCCAATTTCCTAATAAATA
CGGGCTAAGGGTCAATGGGGTCATTTGCAAGTAATCTTGTAGTCTACTCA
GAAAGTTCTGCAAAGTTAGAAAGTGATTAAATGACTGTTTGTTAAGATAT
ACTTACATAGTAATAACCTAAATGCATTTGTTAAGTGGTTGTAGAGAGAG
GGATTTAAAATTTTATCCTATATGAAATTTTCCTTTTTGGTGTCTGTTAT
TTAATAGGATTGTTTGAATTAGGGGATACTATTTGGTGCCTTTGTAACTA
TATGAAAATTAGTTGGTTGAATATTACTGCTTTCCATGTTCATATTTATA
TTTGTATAGACATATATATATATACACATATACTACTTTCCTTTCCATTT
TCATATTTATATTTGTGTATACACATATACATAAACATATATTTTATACA
TTTTTGAAAAGGAAAATTAACTTAAGGGCATATTTAATGAATATTCAAAA
ATTTTTTTGCTGATCAAATTATCATTCTGCTTTAAACTTTTGAAATGATC
CAAAAAAATTTTAAATGACTTAGATTTACTGTTACAAAATGCTTGTCTTT
TGATGTCACAAACATTATATACTATAATCACTGGCCAGAGATAATTGCTA
TAAGTATAATGAAAAGGGAAATGATGGAAGAATCTCTGCAGCTATCCTCA
TAAATGAGGGTGGGAACACGATGGGCAGTTCCAAAGTTGAAAATAGAGAA
TATATGTGGATTTATATTAACATAATTGGTATTCTTGGATAGTTAAAAAT
GGCTAAACTGTAGGAGAAGCCCGAGTAATTACTGTTAACAGAGGAATAAA
TTTGAGGGCAATAATAATGATGATAGGCCAGGCACTGTGGCTCATGCCTG
TAATCCCAGCACTTTGGGAACCCGAGGCGAGCGGACCACCTGAGGTCAGG
AGTTCGAGAGCAGCCTGGCCAACATGGTGAAACCTCGTCTCTACTAAAAA
TAGAAAAATTATCCGAGTGTGGTGGTGCGTGCCTGTAATCCCAGCTACTT
GGGAGGCTGAGGCAGGAGAATCACTTGTACCTGGGAGGCGGAGTTGCAGT
GAGCCGAAATCGCGCCACTGCGCTCCAGCCTGTGGGCCAGAGCGAGACTC
CGCCTCAGAATAATAATAATGATAATAATAATAACGCCACCAACAATACT
AAGAGCTAACATTTACTGAGTGCTTACTATGCACCAGATATTGTTCTAAG
TATACATTTATTATCTCATTTAACCATCCATAATACTGTGGTATAGACAC
TTTTATATCCATTTTATAAATAAGTAAACTGAGTTATGGAGAGATTAAAC
GACTTGCCAGTAAGATTCAAAGCCTGTGTACAAGCTCACGCTTGATTCTG
GAGCCAGTGTTCTTAACACAGTATCTTGAGAATGTTAAACTAAAAAGTTT
TTAATTTACAGTATTCTTTCCACAATTAAAAAAGAAATTATGAGTAATTA
TTTTTAGTTCTTTCTTCTCTTCAGGCATTTCCCATGGTTCTTTTCAAGAC
ATAATACATATCATTTAGTGTTGTAGATCTGAAAAAACAAAAGTAGCGTG
AAGATCAAAAATTTTCTAAAGAGACGGAGTCTCGCTACGTTCCCTAGGCT
GGAACACCCAGGCTTCTCCAGCCTCACACCTCTGAGTAGCTGGAACCACC
CTGTCCGCTAAGGTCAATGTTTAATCGTATCTTTGTAGGTCTACTGACCA
GTTAAAAAGAGGTGCTGTATACATTGGTTGTTGTCTTGTCAGAGTTTGAT
GCTTCTATATAGACCATTGTTTTTACATGCTAATACAATTGAAAGCCACT
ACAGATATTTATATTTACAACCCAAAGCTAGGTTTTAACAAGAAACTCAT
AAGGCAAAGGTGAGAAGTAAAATAATTTAGCGCCAAGTGGAGATATATGT
GCAATGCTACTTTGTTGGGCTCAAAACATATTTTTCTTTTAGAAGACTGA
CAGGCTTGAAGTTTATGCCTCCAAAGACAAAAGTGATTATGTTTTGTTTA
GTAGCTTGCAAAGTTGCCAAAGCCATTTTTTCTACTCTTTCCCTGAAATT
GGTTTATATGCTTATTAAAGTCATTTATACCTATTTGCAAATGCTTAACA
TAGTTTCAGATTTTAAGATTTCCCTGCAACTTTATTTCCCTTGAAGTTTA
CAGCAACAGGAGTTCATTTTTATTTTTAATTGCATTTATTCAGTAAGTAA
ACTCCGCCACAGAAAAACTTAGTAGACAAGGTGAGTTCCCCTGTGCTCCG
TGGCAAAGAGTGCGGTGGGTGACATTGACCCATGGTTAGGTAATCTGGTA
AGGAAAGACCCCGTTGTAACACATCTGAGCAACGAGACCAAAGGAAGGGC
TTGCTGCCACGAGGCGAAGTCTGCTTTTTTGAACAGAGAGCCCAGCAGAG
TTGGGCGGCAATCGTGCCCAGCACTGAGGCCGAGGAGAAAGAGAGCAGGA
GCATTACATTACTGCACCAAGAGTAGGAAAATATGATGCATGTTTGGGAC
CAGGCAACCGAAATCCCTTCTCAGCAGCGCCTCCCAAAGCCGGGCACCGC
CTTCCTTCGGAGAAGGCGCAGAGTCCCCAGACTCGGGCTGAGCCGCACCC
CCATCTCCTTTCTCTTTCCTCCGCCGCTAAACACAGACGAGCACGTGAGC
GTCGCAGCCCGTCCCAGCTGTGCCTCAGCTGACCGCCTCCTGATTGGCTG
AGAGCGGCGTGGGCTGGGGTGGGGACTTGCCGCCTGCGTCGCTCGCCATT
GGATCTCGAGGAACCCGCCTCCACCTCAGGTGAGGCGGGCTTGCGGGAGC
GCGCGCCGGCCTGGGCAGGCGAGCGGGCGCGCTCCCGCCCCCTCTCCCCT
CCCCGCGCGCCCGAGCGCGCCTCCGCCCTTGCCCGCCCCCTGACGCTGCC
TCAGCTCCTCAGTGCACAGTGCTGCCTCGTCTGAGGGGACAGGAGGATCA
CCCTCTTCGTCGCTTCGGCCAGTGTGTCGGGCTGGGCCCTGACAAGCCAC
CTGAGGAGAGGCTCGGAGCCGGGCCCGGACCCCGGCGATTGCCGCCCGCT
TCTCTCTAGTCTCACGAGGGGTTTCCCGCCTCGCACCCCCACCTCTGGAC
TTGCCTTTCCTTCTCTTCTCCGCGTGTGGAGGGAGCCAGCGCTTAGGCCG
GAGCGAGCCTGGGGGCCGCCCGCCGTGAAGACATCGCGGGGACCGATTCA
CCATG

[0313] 5) IL-8. IL-8 is a member of the CXC chemokine family. IL-8 is a chemokine produced by macrophages, immune and epithelial cells and is an important mediator of immune reaction in the innate immune system (reviewed in Waugh and Wilson, 2008; Clin Cancer Res 14; 6735). While neutrophil granulocytes are the primary target cells of IL-8, there is a relative wide range of cells (endothelial cells, macrophages, mast cells, and keratinocytes) respond to IL-8. IL-8, also known as neutrophil chemotactic factor, has two primary functions. It induces chemotaxis in target cells, primarily neutrophils but also other granulocytes, causing them to migrate toward the site of infection. IL-8 also induces phagocytosis once they have arrived. IL-8 is also known to be a potent promoter of angiogenesis. In target cells, IL-8 induces a series of physiological responses required for migration and phagocytosis, such as increase of intracellular Ca2+, exocytosis (e.g. histamine release), and respiratory burst.

[0314] IL-8 can be secreted by any cells with toll-like receptors that are involved in the innate immune response. Generally, macrophages see the antigen first, and thus are first to release IL-8 to recruit other cells. Both monomer and homodimer forms of IL-8 have been reported to be potent inducers of the chemokines CXCR1 and CXCR2. The homodimer is more potent, but methylation of Leu25 can block activity of the dimers. IL-8 is believed to play a role in the pathogenesis of bronchiolitis, a common respiratory tract disease caused by viral infection. IL-8 is implicated in gingivitis, psoriasis and increased oxidant stress thereby enhancing the recruitment of inflammatory cells to the site of local inflammation.

[0315] Protein: IL-8 Gene: IL-8 (Homo sapiens, chromosome 4, 74606223-74609433 [NCBI Reference Sequence: NC_{—}000004.11]; start site location: 74606376; strand: positive)

Gene Identification

| | |
|---|---|
| GeneID | 3576 |
| HGNC | 6025 |
| HPRD | 00909 |
| MIM | 146930 |

Targeted Sequences

| | | | Relative |
|---|---|---|---|
| | | | upstream |
| | | | location |
| | | | to gene |
| Sequence | Design | | start |
| ID No: | ID | Sequence (5′-3′) | site |
| 1314 | IL8-1 | ACGTCCCATTCGGCTCCTGAGCCA | 2868 |
| 1331 | IL8-3 | GACGTTGACGAAGTCTATCACCCAA | 2939 |
| 1341 | | ACGGAGTATGACGAAAGTTTTC | 257 |
| 1342 | | GAGCGAGACTCCCGTCTAAA | 3259 |

Target Shift Sequences

| | | Relative |
|---|---|---|
| | | upstream |
| Sequence | | location to |
| ID No: | Sequence (5′-3′) | gene start site |
| 1314 | ACGTCCCATTCGGCTCCTGAGCCA | 2868 |
| 1315 | CGTCCCATTCGGCTCCTGAG | 2869 |
| 1316 | GTCCCATTCGGCTCCTGAGC | 2870 |
| 1317 | TCCCATTCGGCTCCTGAGCC | 2871 |
| 1318 | CCCATTCGGCTCCTGAGCCA | 2872 |
| 1319 | CCATTCGGCTCCTGAGCCAT | 2873 |
| 1320 | CATTCGGCTCCTGAGCCATA | 2874 |
| 1321 | ATTCGGCTCCTGAGCCATAA | 2875 |
| 1322 | TTCGGCTCCTGAGCCATAAG | 2876 |
| 1323 | TCGGCTCCTGAGCCATAAGA | 2877 |
| 1324 | CGGCTCCTGAGCCATAAGAA | 2878 |
| 1325 | TACGTCCCATTCGGCTCCTG | 2867 |
| 1326 | TTACGTCCCATTCGGCTCCT | 2866 |
| 1327 | TTTACGTCCCATTCGGCTCC | 2865 |
| 1328 | ATTTACGTCCCATTCGGCTC | 2864 |
| 1329 | TATTTACGTCCCATTCGGCT | 2863 |
| 1330 | TTATTTACGTCCCATTCGGC | 2862 |
| 1331 | GACGTTGACGAAGTCTATCACCCAA | 2939 |
| 1332 | ACGTTGACGAAGTCTATCAC | 2940 |
| 1333 | CGTTGACGAAGTCTATCACC | 2941 |
| 1334 | GTTGACGAAGTCTATCACCC | 2942 |
| 1335 | TTGACGAAGTCTATCACCCA | 2943 |
| 1336 | TGACGAAGTCTATCACCCAA | 2944 |
| 1337 | GACGAAGTCTATCACCCAAG | 2945 |
| 1338 | ACGAAGTCTATCACCCAAGA | 2946 |
| 1339 | CGAAGTCTATCACCCAAGAA | 2947 |
| 1340 | AGACGTTGACGAAGTCTATC | 2938 |
| 1341 | ACGGAGTATGACGAAAGTTTTC | 257 |
| 1342 | GAGCGAGACTCCCGTCTAAA | 3259 |
| 1343 | AGCGAGACTCCCGTCTAAAA | 3260 |
| 1344 | GCGAGACTCCCGTCTAAAAA | 3261 |
| 1345 | CGAGACTCCCGTCTAAAAAA | 3262 |
| 1346 | GAGACTCCCGTCTAAAAAAG | 3263 |
| 1347 | AGAGCGAGACTCCCGTCTAA | 3258 |
| 1348 | AAGAGCGAGACTCCCGTCTA | 3257 |
| 1349 | AAAGAGCGAGACTCCCGTCT | 3256 |
| 1350 | GAAAGAGCGAGACTCCCGTC | 3255 |
| 1351 | TGAAAGAGCGAGACTCCCGT | 3254 |
| 1352 | GTGAAAGAGCGAGACTCCCG | 3253 |
| 1353 | GGTGAAAGAGCGAGACTCCC | 3252 |

Hot Zones (Relative upstream location to gene start site)
1-300
2650-3300
4800-5000

### Examples

[0316] In FIG. 22, IL8-1 (41) and IL8-3 (42), both at 10 μM, demonstrated statistically significant (P<0.05) inhibition compared to the untreated control values in MDA-MB-231 (human breast cell line). The negative control did not produce a statistically significant difference compared to the untreated control. The IL-8 sequences IL8-1 (41) and IL8-3 (42) fit the independent and dependent DNAi motif claims.

[0317] In FIG. 23, IL8-1 (41) and IL8-3 (42), both at 10 μM, demonstrated statistically significant (P<0.05) inhibition compared to the untreated control values in DU145 (human prostate cell line). The negative control did not produce a statistically significant difference compared to the untreated control. The IL-8 sequences IL8-1 (41) and IL8-3 (42) fit the independent and dependent DNAi motif claims.

[0318] The secondary structures for IL8-1 and IL8-3 are shown in FIGS. 24 and 25. Sequence 41 (IL8-1) is shown in FIG. 24 and Sequence 42 (IL8-3) is shown in FIG. 25.

Genetic Code (5′ Upstream Region)

(SEQ ID NO: 11954)

GGCATTAAAAAAGAAAGCTTATATAGTGGAAGAAAATAAAGCATCTAGAC
ATAAGCTTTAAGAGATCTATTGTGTTAATACAGCTTTACTTTTTGAGTGG
TAAGCTTTTAAAAAGAAATGTGGTGCTCTAACTCCAGGAAAAGATAAGGG
TGACTGAAGTGATAGTCTAGAGGAAAAAGATGCAGACATTTACTGAGTAC
CTCCAATGTGCCAGGTGCCATTCTGGGCATTTTCATTATGTTTCCTCATT
TAATTCTCATGGTGATCCTTTGGAACTGTGTTATTCTCATTTTTACAGAT
GAGGTAACTGAGAGACAGTCAGATTAAAGAACTGCCTATGATTGTTTGGC
TAATAATAAGTGGAGGGGTGAGGCTTGAAGGCAGGTTTGTCTTATTCCAA
CACCCATACATACCCTTAAATTTAAGTTATTCTGACTTGTGTTGCTCAAA
TCCAATGTGTTCAGCTGTTTGCTTCTCCAATTACCAAGATTTTTCTTTAA
AAGGTAGGACACTTTTGGCAACACGAACCAACTTTGCTCAGTATTGTTAT
AAACTGTTAACTGGAGACATTTGAATTTGGAGATGGAACTGAAATGGTCT
TGCGGTACTAGAGAAGATCAAGTTATCACATAAACAAAGTACAGAGCTGA
GAACATATTTTAAATCTTTCCACTAACTCTGACTTTTATTGACTAAAATT
TTAGTGGGCAGTATGTTTATGTTTATGACTCTTAACATTAACAACATCGT
AAGTCAAACTCACTAATATATGTTAAGCATTCTGTTTATGATTCTTTTAA
CCTAGAGGATTGTTGAGCTGGGACTAATTTCCTCAAATGGGAAAAAAACC
CAGGTGAGAGCTGAGACTGCTCCTGAGACTGAGAAAGGCAGCTCTGACGG
GATCTCAGATTTTAGCAGCAGGAGTTGAACAATGGGCATAGAATCAGCTT
GCCCAAGATCTCCTGATTAATAAACCATGGAACAAGATTTAAACCCAAGT
TCATTTCATTTCAAAGCTCATACCACATTTTGCCCACCATATTTTGCTTT
GTTATATGACTACAACTTAGTTCAGGCTTACAAAAAAGTCCTAATTCTAA
AATTCCTATGGCGTGGGTGGGAGGGGATTTAGATGATTTTGCATAGGCAA
GAAACACCCAGTTTCATGGAGTTTGATGGAAGAGTTATGTACTAATATGG
GAAAAGTAGAGGCCATCTTTGTCTTTGTTCTTTCTTTTTTAGACGGGAGT
CTCGCTCTTTCACCCAGGCTGGAGTGCAGTGGCGCTATCTCGGCTCACTG
CAAGCTCCGCCTCCTGGGTTCACGCCATTCTCCTGCCTCAGCCTCCTGAG
TAGCTGGGACTACAGGCGCCCGCCACCGCTCCCGGCTAATTTTTTATATT
TTCAGTAGAGACGGGGTTTCACCGTGTTAGCTAAGATGGTTTGGATCTCC
TGAACTCGTGATCCGCCCGCCTCGGACTCCCAAAGTGCTGGGATTACAGG
CTTGAGCCACCGCGCCCGGCCGTCTTTGTTCTTTCTTGAACTCTTCCTTT
TCTTGGGTGATAGACTTCGTCAACGTCTAATGAGGATATCTAGGTGCTAG
TCTCTGCTCATCAAATGATTCTTATGGCTCAGGAGCCGAATGGGACGTAA
ATAAACAGTTAAGTCTCATGAACTCACTTTGCATTCATCTCTAGAAGATG
ACAAAACATTTGTATTTATGTGTAGCGTGGCACTTTAGTTAAACTTTGTA
CCCCACTTTGCTCTATTTTAAAGCAGAATATCCTTAAAAAGGATACTTAG
TCCTGCTTTTTTTTTTCCGCCTAAGCCCATTTAGTCCTTCTACTCATTAT
GCAAGGACTCAAATGGTTATCTTTACAGAAGTGAGACAAGATAGAATCAA
TGCTCTTGTAGTCACTTCATCTTTGTCCATTCCCACTTCTGATGGAGAGG
GTTCTAGGACATAATGCACTGAAGGTTACATTGTGAGAGATGAACAACAT
TTGCAAAAGAGGTCTTTTTGCCTTGGAAAGGCTTCATTCTTAAAAAAAAA
TGTGAGCATCAAGGTTAAGTAGACCTCATTAGCTCAAACTTTAAGGATGA
TATCAGGATAAAGTTGGGCCCATGAGAAGAGAATGAGAGGGAGATATAGT
GACATGAAAATAAGGAGGAAAACGAGGTGTCTATGTAAGTTGGGCTCACC
ATAAATACAAAGGCAACCGTTAGGGAAAAGCAAAGAAGTCTTTGCACATC
CTCAGAACTCTGAATGTCTTAGTGATGCTGTATGAGTGAGTCTTAATGAT
AGTGAACTGAATCAGTCAAGCCAGGTTGTGTCCATATGAGAATGTGTCTT
TGCTAAACATGCCAACATCACTGAAGCAAAGAAACTTGGAGTTTTCTTTA
AGATATAGGTCTTTTTTACCTATCCGGCCCAAGCTTTCTCTTCTTGTCAC
TCCATGCACTGTGTTCCGTATGCTAAATAGTTTGAGAAACCCAAATGGGC
CATGTTCGCCTACATTTCATTGTCCTGTACTTCCTGTCCTGTACTAGCAA
AGCAGTCCCATTGGTCTTTCTTCTCCTCATTAACAATAAAGGTAACACTT
TTGATGTTGTTTCTTCAGAAAACCTTCATTCATCAAAACTGCCTCAAAGA
TCATGTTTGTTTGATTCCAGAACTTCCTGTAATTACCTGTTATTGTAACA
CTCATCACTGTATTTTACTTACTTGTGTAACTAATTTTCCATATTCTGCA
CTAGACAACAAAGTCCTTTAAGTCAGGTACTATATCTATTTACATAGCAT
TCACATCTCCTACAATAAGGGACATTAGCAGATAAACAACACATATTAAA
TGAATAATGAAGTTTCTGAAATACTACAGTTGAAAACTATAGGAGCTACA
TTATATAGAATAAACATTTACTTTGCTATAGAATTCAGTGTAACCCAGGC
ATTATTTTATCCTCAAGTCTTAGGTTGGTTGGAGAAAGATAACAAAAAGA
AACATGATTGTGCAGAAACAGACAAACCTTTTTGGAAAGCATTTGAAAAT
GGCATTCCCCCTCCACAGTGTGTTCACAGTGTGGGCAAATTCACTGCTCT
GTCGTACTTTCTGAAAATGAAGAACTGTTACACCAAGGTGAATTATTTAT
AAATTATGTACTTGCCCAGAAGCGAACAGACTTTTACTATCATAAGAACC
CTTCCTTGGTGCTCTTTATCTACAGAATCCAAGACCTTTCAAGAAAGGTC
TTGGATTCTTTTCTTCAGGACACTAGGACATAAAGCCACCTTTTTATGAT
TTGTTGAAATTTCTCACTCCATCCCTTTTGCTAGTGATCATGGGTCCTCA
GAGGTCAGACTTGGTGTCCTTGGATAAAGAGCATGAAGCAACAGTGGCTG
AACCAGAGTTGGAACCCAGATGCTCTTTCCACTAAGCATACAACTTTCCA
TTAGATAACACCTCCCTCCCACCCCAACCAAGCAGCTCCAGTGCACCACT
TTCTGGAGCATAAACATACCTTAACTTTACAACTTGAGTGGCCTTGAATA
CTGTTCCTATCTGGAATGTGCTGTTCTCTTTCATCTTCCTCTATTGAAGC
CCTCCTATTCCTCAATGCCTTGCTCCAACTGCCTTTGGAAGATTCTGCTC
TTATGCCTCCACTGGAATTAATGTCTTAGTACCACTTGTCTATTCTGCTA
TATAGTCAGTCCTTACATTGCTTTCTTCTTCTGATAGACCAAACTCTTTA
AGGACAAGTACCTAGTCTTATCTATTTCTAGATCCCCCACATTACTCAGA
AAGTTACTCCATAAATGTTTGTGGAACTGATTTCTATGTGAAGCACATGT
GCCCCTTCACTCTGTTAACATGCATTAGAAAACTAAATCTTTTGAAAAGT
TGTAGTATGCCCCCTAAGAGCAGTAACAGTTCCTAGAAACTCTCTAAAAT
GCTTAGAAAAAGATTTATTTTAAATTACCTCCCCAATAAAATGATTGGCT
GGCTTATCTTCACCATCATGATAGCATCTGTAATTAACTGAAAAAAAATA
ATTATGCCATTAAAAGAAAATCATCCATGATCTTGTTCTAACACCTGCCA
CTCTAGTACTATATCTGTCACATGGTACTATGATAAAGTTATCTAGAAAT
AAAAAAGCATACAATTGATAATTCACCAAATTGTGGAGCTTCAGTATTTT
AAATGTATATTAAAATTAAATTATTTTAAAGATCAAAGAAAACTTTCGTC
ATACTCCGTATTTGATAAGGAACAAATAGGAAGTGTGATGACTCAGGTTT
GCCCTGAGGGGATGGGCCATCAGTTGCAAATCGTGGAATTTCCTCTGACA
TAATGAAAAGATGAGGGTGCATAAGTTCTCTAGTAGGGTGATGATATAAA
AAGCCACCGGAGCACTCCATAAGGCACAAACTTTCAGAGACAGCAGAGCA
CACAAGCTTCTAGGACAAGAGCCAGGAAGAAACCACCGGAAGGAACCATC
TCACTGTGTGTAAACATG

[0319] 6) KRAS or GTPase KRas also known as V-Ki-ras2 Kirsten rat sarcoma viral oncogene homolog and KRAS, is a protein that in humans is encoded by the KRAS gene (McGrath et al. Nature 1983; 304 (5926): 501-6, Popescu et al., Somat. Cell Mol. Genet. 1985; 11 (2): 149-55) and is usually tethered to cell membranes because by its C-terminal isoprenyl group. The protein product of the normal KRAS gene performs an essential function in normal tissue signaling. A single amino acid substitution resulting from a particular single nucleotide substitution in genomic DNA, is responsible for the activating mutation. Once on, it recruits and activates C-RAF and PI3Kinase necessary for to propagate growth factor and other receptor signals. The transformed protein that results is implicated in various malignancies, including leukemias, lung adenocarcinoma, mucinous adenoma, ductal carcinoma of the pancreas and colorectal carcinoma (Kranenburg, Biochim. Biophys. Acta 2005; 1756 (2): 81-2; Burmer and Loeb, Proc. Natl. Acad. Sci. U.S.A. 86 (7): 2403-7, Tam et al, Clin. Cancer Res. 12 (5): 1647-53, Almoguera et al, Cell 53 (4): 549-54). Several germline KRAS mutations have been found to be associated with Noonan syndrome (Gelb and Tartaglia, Human Molecular Genetics, 2006; 15 (2): R220-226).

[0320] Protein: KRAS Gene: KRAS (Homo sapiens, chromosome 12, 25358180-25403854 [NCBI Reference Sequence: NC_{—}000012.11]; start site location: 25398318; strand: negative)

Gene Identification

| | |
|---|---|
| GeneID | 3845 |
| HGNC | 6407 |
| HPRD | 01817 |
| MIM | 190070 |

Targeted Sequences

| | | | Relative upstream |
|---|---|---|---|
| Sequence | Design | | location to gene start |
| ID No: | ID | Sequence (5′-3′) | site |
| 1354 | KR1 | CCCGGAGCGGGACCGGACCGCGG | 5923 |
| 1435 | KR2 | GCCGGACCCACGCGGCGGCCCGCC | 5856 |
| 1516 | KR0525 | AGTCTCCCCTTCCCGGAGACT | 10265 |
| 1535 | | GCCGGGCCGGCTGGAGAGCGGGTC | 5803 |
| 1538 | | TCGCCCCTCCTCCGAGACTTTC | 6626 |
| 1584 | | GCACCCCGCCACCCTCAGGGTCGGC | 6029 |
| 1633 | | GAGCCGCCGCCACCTTCGCCGCCGC | 5475 |
| 1697 | | CGGCATAGTTCCCCGCCTTAC | 2002 |
| 1730 | KR16 | CGGCCCGAGCCTCCGTGACGAGTGC | 146348 |
| 1767 | KR17 | CTGGGAGGGGATCCCTCACCGAGAG | 3328 |

Target Shift Sequences

| | | Relative |
|---|---|---|
| | | upstream |
| Sequence | | location to |
| ID No: | Sequence (5′-3′) | gene start site |
| 1354 | CCCGGAGCGGGACCGGACCGCGG | 5923 |
| 1355 | CCGGAGCGGGACCGGACCGC | 5924 |
| 1356 | CGGAGCGGGACCGGACCGCG | 5925 |
| 1357 | ACCCGGAGCGGGACCGGACC | 5922 |
| 1358 | GACCCGGAGCGGGACCGGAC | 5921 |
| 1359 | TGACCCGGAGCGGGACCGGA | 5920 |
| 1360 | CTGACCCGGAGCGGGACCGG | 5919 |
| 1361 | TCTGACCCGGAGCGGGACCG | 5918 |
| 1362 | TTCTGACCCGGAGCGGGACC | 5917 |
| 1363 | ATTCTGACCCGGAGCGGGAC | 5916 |
| 1364 | AATTCTGACCCGGAGCGGGA | 5915 |
| 1365 | CAATTCTGACCCGGAGCGGG | 5914 |
| 1366 | CCAATTCTGACCCGGAGCGG | 5913 |
| 1367 | GCCAATTCTGACCCGGAGCG | 5912 |
| 1368 | CGCCAATTCTGACCCGGAGC | 5911 |
| 1369 | CCGCCAATTCTGACCCGGAG | 5910 |
| 1370 | GCCGCCAATTCTGACCCGGA | 5909 |
| 1371 | AGCCGCCAATTCTGACCCGG | 5908 |
| 1372 | CAGCCGCCAATTCTGACCCG | 5907 |
| 1373 | GCAGCCGCCAATTCTGACCC | 5906 |
| 1374 | CGCAGCCGCCAATTCTGACC | 5905 |
| 1375 | CCGCAGCCGCCAATTCTGAC | 5904 |
| 1376 | CCCGCAGCCGCCAATTCTGA | 5903 |
| 1377 | CCCCGCAGCCGCCAATTCTG | 5902 |
| 1378 | TCCCCGCAGCCGCCAATTCT | 5901 |
| 1379 | GTCCCCGCAGCCGCCAATTC | 5900 |
| 1380 | TGTCCCCGCAGCCGCCAATT | 5899 |
| 1381 | CTGTCCCCGCAGCCGCCAAT | 5898 |
| 1382 | GCTGTCCCCGCAGCCGCCAA | 5897 |
| 1383 | GGCTGTCCCCGCAGCCGCCA | 5896 |
| 1384 | AGGCTGTCCCCGCAGCCGCC | 5895 |
| 1385 | AAGGCTGTCCCCGCAGCCGC | 5894 |
| 1386 | CAAGGCTGTCCCCGCAGCCG | 5893 |
| 1387 | GCAAGGCTGTCCCCGCAGCC | 5892 |
| 1388 | CGCAAGGCTGTCCCCGCAGC | 5891 |
| 1389 | CCGCAAGGCTGTCCCCGCAG | 5890 |
| 1390 | GCCGCAAGGCTGTCCCCGCA | 5889 |
| 1391 | AGCCGCAAGGCTGTCCCCGC | 5888 |
| 1392 | TAGCCGCAAGGCTGTCCCCG | 5887 |
| 1393 | CTAGCCGCAAGGCTGTCCCC | 5886 |
| 1394 | CCTAGCCGCAAGGCTGTCCC | 5885 |
| 1395 | GCCTAGCCGCAAGGCTGTCC | 5884 |
| 1396 | TGCCTAGCCGCAAGGCTGTC | 5883 |
| 1397 | CTGCCTAGCCGCAAGGCTGT | 5882 |
| 1398 | CCTGCCTAGCCGCAAGGCTG | 5881 |
| 1399 | CCCTGCCTAGCCGCAAGGCT | 5880 |
| 1400 | CCCCTGCCTAGCCGCAAGGC | 5879 |
| 1401 | CCCCCTGCCTAGCCGCAAGG | 5878 |
| 1402 | GCCCCCTGCCTAGCCGCAAG | 5877 |
| 1403 | CGCCCCCTGCCTAGCCGCAA | 5876 |
| 1404 | CCGCCCCCTGCCTAGCCGCA | 5875 |
| 1405 | CCCGCCCCCTGCCTAGCCGC | 5874 |
| 1406 | GCCCGCCCCCTGCCTAGCCG | 5873 |
| 1407 | GGCCCGCCCCCTGCCTAGCC | 5872 |
| 1408 | CGGCCCGCCCCCTGCCTAGC | 5871 |
| 1409 | GCGGCCCGCCCCCTGCCTAG | 5870 |
| 1410 | GGCGGCCCGCCCCCTGCCTA | 5869 |
| 1411 | CGGCGGCCCGCCCCCTGCCT | 5868 |
| 1412 | GCGGCGGCCCGCCCCCTGCC | 5867 |
| 1413 | CGCGGCGGCCCGCCCCCTGC | 5866 |
| 1414 | ACGCGGCGGCCCGCCCCCTG | 5865 |
| 1415 | CACGCGGCGGCCCGCCCCCT | 5864 |
| 1416 | CCACGCGGCGGCCCGCCCCC | 5863 |
| 1417 | CCCACGCGGCGGCCCGCCCC | 5862 |
| 1418 | ACCCACGCGGCGGCCCGCCC | 5861 |
| 1419 | GACCCACGCGGCGGCCCGCC | 5860 |
| 1420 | GGACCCACGCGGCGGCCCGC | 5859 |
| 1421 | CGGACCCACGCGGCGGCCCG | 5858 |
| 1422 | CCGGACCCACGCGGCGGCCC | 5857 |
| 1423 | GCCGGACCCACGCGGCGGCC | 5856 |
| 1424 | TGCCGGACCCACGCGGCGGC | 5855 |
| 1425 | CTGCCGGACCCACGCGGCGG | 5854 |
| 1426 | ACTGCCGGACCCACGCGGCG | 5853 |
| 1427 | GACTGCCGGACCCACGCGGC | 5852 |
| 1428 | GGACTGCCGGACCCACGCGG | 5851 |
| 1429 | GGGACTGCCGGACCCACGCG | 5850 |
| 1430 | AGGGACTGCCGGACCCACGC | 5849 |
| 1431 | GAGGGACTGCCGGACCCACG | 5848 |
| 1432 | GGAGGGACTGCCGGACCCAC | 5847 |
| 1433 | AGGAGGGACTGCCGGACCCA | 5846 |
| 1434 | GAGGAGGGACTGCCGGACCC | 5845 |
| 1435 | GCCGGACCCACGCGGCGGCCCGCC | 5856 |
| 1436 | CCGGACCCACGCGGCGGCCC | 5857 |
| 1437 | CGGACCCACGCGGCGGCCCG | 5858 |
| 1438 | GGACCCACGCGGCGGCCCGC | 5859 |
| 1439 | GACCCACGCGGCGGCCCGCC | 5860 |
| 1440 | ACCCACGCGGCGGCCCGCCC | 5861 |
| 1441 | CCCACGCGGCGGCCCGCCCC | 5862 |
| 1442 | CCACGCGGCGGCCCGCCCCC | 5863 |
| 1443 | CACGCGGCGGCCCGCCCCCT | 5864 |
| 1444 | ACGCGGCGGCCCGCCCCCTG | 5865 |
| 1445 | CGCGGCGGCCCGCCCCCTGC | 5866 |
| 1446 | GCGGCGGCCCGCCCCCTGCC | 5867 |
| 1447 | CGGCGGCCCGCCCCCTGCCT | 5868 |
| 1448 | GGCGGCCCGCCCCCTGCCTA | 5869 |
| 1449 | GCGGCCCGCCCCCTGCCTAG | 5870 |
| 1450 | CGGCCCGCCCCCTGCCTAGC | 5871 |
| 1451 | GGCCCGCCCCCTGCCTAGCC | 5872 |
| 1452 | GCCCGCCCCCTGCCTAGCCG | 5873 |
| 1453 | CCCGCCCCCTGCCTAGCCGC | 5874 |
| 1454 | CCGCCCCCTGCCTAGCCGCA | 5875 |
| 1455 | CGCCCCCTGCCTAGCCGCAA | 5876 |
| 1456 | GCCCCCTGCCTAGCCGCAAG | 5877 |
| 1457 | CCCCCTGCCTAGCCGCAAGG | 5878 |
| 1458 | CCCCTGCCTAGCCGCAAGGC | 5879 |
| 1459 | CCCTGCCTAGCCGCAAGGCT | 5880 |
| 1460 | CCTGCCTAGCCGCAAGGCTG | 5881 |
| 1461 | CTGCCTAGCCGCAAGGCTGT | 5882 |
| 1462 | TGCCTAGCCGCAAGGCTGTC | 5883 |
| 1463 | GCCTAGCCGCAAGGCTGTCC | 5884 |
| 1464 | CCTAGCCGCAAGGCTGTCCC | 5885 |
| 1465 | CTAGCCGCAAGGCTGTCCCC | 5886 |
| 1466 | TAGCCGCAAGGCTGTCCCCG | 5887 |
| 1467 | AGCCGCAAGGCTGTCCCCGC | 5888 |
| 1468 | GCCGCAAGGCTGTCCCCGCA | 5889 |
| 1469 | CCGCAAGGCTGTCCCCGCAG | 5890 |
| 1470 | CGCAAGGCTGTCCCCGCAGC | 5891 |
| 1471 | GCAAGGCTGTCCCCGCAGCC | 5892 |
| 1472 | CAAGGCTGTCCCCGCAGCCG | 5893 |
| 1473 | AAGGCTGTCCCCGCAGCCGC | 5894 |
| 1474 | AGGCTGTCCCCGCAGCCGCC | 5895 |
| 1475 | GGCTGTCCCCGCAGCCGCCA | 5896 |
| 1476 | GCTGTCCCCGCAGCCGCCAA | 5897 |
| 1477 | CTGTCCCCGCAGCCGCCAAT | 5898 |
| 1478 | TGTCCCCGCAGCCGCCAATT | 5899 |
| 1479 | GTCCCCGCAGCCGCCAATTC | 5900 |
| 1480 | TCCCCGCAGCCGCCAATTCT | 5901 |
| 1481 | CCCCGCAGCCGCCAATTCTG | 5902 |
| 1482 | CCCGCAGCCGCCAATTCTGA | 5903 |
| 1483 | CCGCAGCCGCCAATTCTGAC | 5904 |
| 1484 | CGCAGCCGCCAATTCTGACC | 5905 |
| 1485 | GCAGCCGCCAATTCTGACCC | 5906 |
| 1486 | CAGCCGCCAATTCTGACCCG | 5907 |
| 1487 | AGCCGCCAATTCTGACCCGG | 5908 |
| 1488 | GCCGCCAATTCTGACCCGGA | 5909 |
| 1489 | CCGCCAATTCTGACCCGGAG | 5910 |
| 1490 | CGCCAATTCTGACCCGGAGC | 5911 |
| 1491 | GCCAATTCTGACCCGGAGCG | 5912 |
| 1492 | CCAATTCTGACCCGGAGCGG | 5913 |
| 1493 | CAATTCTGACCCGGAGCGGG | 5914 |
| 1494 | AATTCTGACCCGGAGCGGGA | 5915 |
| 1495 | ATTCTGACCCGGAGCGGGAC | 5916 |
| 1496 | TTCTGACCCGGAGCGGGACC | 5917 |
| 1497 | TCTGACCCGGAGCGGGACCG | 5918 |
| 1498 | CTGACCCGGAGCGGGACCGG | 5919 |
| 1499 | TGACCCGGAGCGGGACCGGA | 5920 |
| 1500 | GACCCGGAGCGGGACCGGAC | 5921 |
| 1501 | ACCCGGAGCGGGACCGGACC | 5922 |
| 1502 | CCCGGAGCGGGACCGGACCG | 5923 |
| 1503 | CCGGAGCGGGACCGGACCGC | 5924 |
| 1504 | CGGAGCGGGACCGGACCGCG | 5925 |
| 1505 | TGCCGGACCCACGCGGCGGC | 5855 |
| 1506 | CTGCCGGACCCACGCGGCGG | 5854 |
| 1507 | ACTGCCGGACCCACGCGGCG | 5853 |
| 1508 | GACTGCCGGACCCACGCGGC | 5852 |
| 1509 | GGACTGCCGGACCCACGCGG | 5851 |
| 1510 | GGGACTGCCGGACCCACGCG | 5850 |
| 1511 | AGGGACTGCCGGACCCACGC | 5849 |
| 1512 | GAGGGACTGCCGGACCCACG | 5848 |
| 1513 | GGAGGGACTGCCGGACCCAC | 5847 |
| 1514 | AGGAGGGACTGCCGGACCCA | 5846 |
| 1515 | GAGGAGGGACTGCCGGACCC | 5845 |
| 1516 | AGTCTCCCCTTCCCGGAGACT | 10265 |
| 1517 | GTCTCCCCTTCCCGGAGACT | 10266 |
| 1518 | TCTCCCCTTCCCGGAGACTT | 10267 |
| 1519 | CTCCCCTTCCCGGAGACTTA | 10268 |
| 1520 | TCCCCTTCCCGGAGACTTAA | 10269 |
| 1521 | CCCCTTCCCGGAGACTTAAT | 10270 |
| 1522 | CCCTTCCCGGAGACTTAATC | 10271 |
| 1523 | CCTTCCCGGAGACTTAATCT | 10272 |
| 1524 | CTTCCCGGAGACTTAATCTT | 10273 |
| 1525 | TTCCCGGAGACTTAATCTTG | 10274 |
| 1526 | TCCCGGAGACTTAATCTTGC | 10275 |
| 1527 | CCCGGAGACTTAATCTTGCT | 10276 |
| 1528 | CCGGAGACTTAATCTTGCTT | 10277 |
| 1529 | CGGAGACTTAATCTTGCTTC | 10278 |
| 1530 | AAGTCTCCCCTTCCCGGAGA | 10264 |
| 1531 | TAAGTCTCCCCTTCCCGGAG | 10263 |
| 1532 | TTAAGTCTCCCCTTCCCGGA | 10262 |
| 1533 | GTTAAGTCTCCCCTTCCCGG | 10261 |
| 1534 | AGTTAAGTCTCCCCTTCCCG | 10260 |
| 1535 | GCCGGGCCGGCTGGAGAGCGGGTC | 5803 |
| 1536 | CCGGGCCGGCTGGAGAGCGG | 5804 |
| 1537 | AGCCGGGCCGGCTGGAGAGC | 5802 |
| 1538 | TCGCCCCTCCTCCGAGACTTTC | 6626 |
| 1539 | CGCCCCTCCTCCGAGACTTT | 6627 |
| 1540 | GCCCCTCCTCCGAGACTTTC | 6628 |
| 1541 | CCCCTCCTCCGAGACTTTCA | 6629 |
| 1542 | CCCTCCTCCGAGACTTTCAG | 6630 |
| 1543 | CCTCCTCCGAGACTTTCAGT | 6631 |
| 1544 | CTCCTCCGAGACTTTCAGTT | 6632 |
| 1545 | TCCTCCGAGACTTTCAGTTC | 6633 |
| 1546 | CCTCCGAGACTTTCAGTTCC | 6634 |
| 1547 | CTCCGAGACTTTCAGTTCCA | 6635 |
| 1548 | TCCGAGACTTTCAGTTCCAT | 6636 |
| 1549 | CCGAGACTTTCAGTTCCATT | 6637 |
| 1550 | CGAGACTTTCAGTTCCATTC | 6638 |
| 1551 | ATCGCCCCTCCTCCGAGACT | 6625 |
| 1552 | GATCGCCCCTCCTCCGAGAC | 6624 |
| 1553 | GGATCGCCCCTCCTCCGAGA | 6623 |
| 1554 | AGGATCGCCCCTCCTCCGAG | 6622 |
| 1555 | TAGGATCGCCCCTCCTCCGA | 6621 |
| 1556 | ATAGGATCGCCCCTCCTCCG | 6620 |
| 1557 | GATAGGATCGCCCCTCCTCC | 6619 |
| 1558 | TGATAGGATCGCCCCTCCTC | 6618 |
| 1559 | CTGATAGGATCGCCCCTCCT | 6617 |
| 1560 | CCTGATAGGATCGCCCCTCC | 6616 |
| 1561 | ACCTGATAGGATCGCCCCTC | 6615 |
| 1562 | TACCTGATAGGATCGCCCCT | 6614 |
| 1563 | GTACCTGATAGGATCGCCCC | 6613 |
| 1564 | TGTACCTGATAGGATCGCCC | 6612 |
| 1565 | CTGTACCTGATAGGATCGCC | 6611 |
| 1566 | CCTGTACCTGATAGGATCGC | 6610 |
| 1567 | GCCTGTACCTGATAGGATCG | 6609 |
| 1568 | CGCCTGTACCTGATAGGATC | 6608 |
| 1569 | GCGCCTGTACCTGATAGGAT | 6607 |
| 1570 | AGCGCCTGTACCTGATAGGA | 6606 |
| 1571 | CAGCGCCTGTACCTGATAGG | 6605 |
| 1572 | GCAGCGCCTGTACCTGATAG | 6604 |
| 1573 | AGCAGCGCCTGTACCTGATA | 6603 |
| 1574 | AAGCAGCGCCTGTACCTGAT | 6602 |
| 1575 | AAAGCAGCGCCTGTACCTGA | 6601 |
| 1576 | AAAAGCAGCGCCTGTACCTG | 6600 |
| 1577 | GAAAAGCAGCGCCTGTACCT | 6599 |
| 1578 | GGAAAAGCAGCGCCTGTACC | 6598 |
| 1579 | TGGAAAAGCAGCGCCTGTAC | 6597 |
| 1580 | CTGGAAAAGCAGCGCCTGTA | 6596 |
| 1581 | GCTGGAAAAGCAGCGCCTGT | 6595 |
| 1582 | GGCTGGAAAAGCAGCGCCTG | 6594 |
| 1583 | GGGCTGGAAAAGCAGCGCCT | 6593 |
| 1584 | GCACCCCGCCACCCTCAGGGTCGGC | 6029 |
| 1585 | CACCCCGCCACCCTCAGGGT | 6030 |
| 1586 | ACCCCGCCACCCTCAGGGTC | 6031 |
| 1587 | CCCCGCCACCCTCAGGGTCG | 6032 |
| 1588 | CCCGCCACCCTCAGGGTCGG | 6033 |
| 1589 | CCGCCACCCTCAGGGTCGGC | 6034 |
| 1590 | CGCCACCCTCAGGGTCGGCC | 6035 |
| 1591 | GCCACCCTCAGGGTCGGCCT | 6036 |
| 1592 | CCACCCTCAGGGTCGGCCTA | 6037 |
| 1593 | CACCCTCAGGGTCGGCCTAT | 6038 |
| 1594 | ACCCTCAGGGTCGGCCTATA | 6039 |
| 1595 | CCCTCAGGGTCGGCCTATAC | 6040 |
| 1596 | CCTCAGGGTCGGCCTATACT | 6041 |
| 1597 | CTCAGGGTCGGCCTATACTG | 6042 |
| 1598 | TCAGGGTCGGCCTATACTGG | 6043 |
| 1599 | CAGGGTCGGCCTATACTGGC | 6044 |
| 1600 | AGGGTCGGCCTATACTGGCG | 6045 |
| 1601 | GGGTCGGCCTATACTGGCGC | 6046 |
| 1602 | GGTCGGCCTATACTGGCGCG | 6047 |
| 1603 | GTCGGCCTATACTGGCGCGC | 6048 |
| 1604 | TCGGCCTATACTGGCGCGCA | 6049 |
| 1605 | CGGCCTATACTGGCGCGCAT | 6050 |
| 1606 | GGCCTATACTGGCGCGCATC | 6051 |
| 1607 | GCCTATACTGGCGCGCATCC | 6052 |
| 1608 | CCTATACTGGCGCGCATCCA | 6053 |
| 1609 | CTATACTGGCGCGCATCCAT | 6054 |
| 1610 | TATACTGGCGCGCATCCATT | 6055 |
| 1611 | ATACTGGCGCGCATCCATTT | 6056 |
| 1612 | TACTGGCGCGCATCCATTTA | 6057 |
| 1613 | ACTGGCGCGCATCCATTTAC | 6058 |
| 1614 | CTGGCGCGCATCCATTTACT | 6059 |
| 1615 | TGGCGCGCATCCATTTACTA | 6060 |
| 1616 | GGCGCGCATCCATTTACTAT | 6061 |
| 1617 | GCGCGCATCCATTTACTATC | 6062 |
| 1618 | CGCGCATCCATTTACTATCA | 6063 |
| 1619 | AGCACCCCGCCACCCTCAGG | 6028 |
| 1620 | GAGCACCCCGCCACCCTCAG | 6027 |
| 1621 | AGAGCACCCCGCCACCCTCA | 6026 |
| 1622 | AAGAGCACCCCGCCACCCTC | 6025 |
| 1623 | GAAGAGCACCCCGCCACCCT | 6024 |
| 1624 | CGAAGAGCACCCCGCCACCC | 6023 |
| 1625 | GCGAAGAGCACCCCGCCACC | 6022 |
| 1626 | TGCGAAGAGCACCCCGCCAC | 6021 |
| 1627 | CTGCGAAGAGCACCCCGCCA | 6020 |
| 1628 | GCTGCGAAGAGCACCCCGCC | 6019 |
| 1629 | AGCTGCGAAGAGCACCCCGC | 6018 |
| 1630 | AAGCTGCGAAGAGCACCCCG | 6017 |
| 1631 | GAAGCTGCGAAGAGCACCCC | 6016 |
| 1632 | AGAAGCTGCGAAGAGCACCC | 6015 |
| 1633 | GAGCCGCCGCCACCTTCGCCGCCGC | 5475 |
| 1634 | AGCCGCCGCCACCTTCGCCG | 5476 |
| 1635 | GCCGCCGCCACCTTCGCCGC | 5477 |
| 1636 | CCGCCGCCACCTTCGCCGCC | 5478 |
| 1637 | CGCCGCCACCTTCGCCGCCG | 5479 |
| 1638 | GCCGCCACCTTCGCCGCCGC | 5480 |
| 1639 | CCGCCACCTTCGCCGCCGCC | 5481 |
| 1640 | CGCCACCTTCGCCGCCGCCA | 5482 |
| 1641 | GCCACCTTCGCCGCCGCCAC | 5483 |
| 1642 | CCACCTTCGCCGCCGCCACT | 5484 |
| 1643 | CACCTTCGCCGCCGCCACTG | 5485 |
| 1644 | ACCTTCGCCGCCGCCACTGC | 5486 |
| 1645 | CCTTCGCCGCCGCCACTGCC | 5487 |
| 1646 | CTTCGCCGCCGCCACTGCCG | 5488 |
| 1647 | TTCGCCGCCGCCACTGCCGC | 5489 |
| 1648 | TCGCCGCCGCCACTGCCGCC | 5490 |
| 1649 | CGCCGCCGCCACTGCCGCCG | 5491 |
| 1650 | GCCGCCGCCACTGCCGCCGC | 5492 |
| 1651 | CCGCCGCCACTGCCGCCGCC | 5493 |
| 1652 | CGCCGCCACTGCCGCCGCCG | 5494 |
| 1653 | GCCGCCACTGCCGCCGCCGC | 5495 |
| 1654 | CCGCCACTGCCGCCGCCGCT | 5496 |
| 1655 | CGCCACTGCCGCCGCCGCTG | 5497 |
| 1656 | GCCACTGCCGCCGCCGCTGC | 5498 |
| 1657 | CCACTGCCGCCGCCGCTGCT | 5499 |
| 1658 | CACTGCCGCCGCCGCTGCTG | 5500 |
| 1659 | ACTGCCGCCGCCGCTGCTGC | 5501 |
| 1660 | CTGCCGCCGCCGCTGCTGCC | 5502 |
| 1661 | TGCCGCCGCCGCTGCTGCCT | 5503 |
| 1662 | GCCGCCGCCGCTGCTGCCTC | 5504 |
| 1663 | CCGCCGCCGCTGCTGCCTCC | 5505 |
| 1664 | CGCCGCCGCTGCTGCCTCCG | 5506 |
| 1665 | GCCGCCGCTGCTGCCTCCGC | 5507 |
| 1666 | CCGCCGCTGCTGCCTCCGCC | 5508 |
| 1667 | CGCCGCTGCTGCCTCCGCCG | 5509 |
| 1668 | GCCGCTGCTGCCTCCGCCGC | 5510 |
| 1669 | CCGCTGCTGCCTCCGCCGCC | 5511 |
| 1670 | CGCTGCTGCCTCCGCCGCCG | 5512 |
| 1671 | GCTGCTGCCTCCGCCGCCGC | 5513 |
| 1672 | CTGCTGCCTCCGCCGCCGCG | 5514 |
| 1673 | TGCTGCCTCCGCCGCCGCGG | 5515 |
| 1674 | GCTGCCTCCGCCGCCGCGGC | 5516 |
| 1675 | CTGCCTCCGCCGCCGCGGCC | 5517 |
| 1676 | CGAGCCGCCGCCACCTTCGC | 5474 |
| 1677 | CCGAGCCGCCGCCACCTTCG | 5473 |
| 1678 | GCCGAGCCGCCGCCACCTTC | 5472 |
| 1679 | GGCCGAGCCGCCGCCACCTT | 5471 |
| 1680 | TGGCCGAGCCGCCGCCACCT | 5470 |
| 1681 | CTGGCCGAGCCGCCGCCACC | 5469 |
| 1682 | ACTGGCCGAGCCGCCGCCAC | 5468 |
| 1683 | TACTGGCCGAGCCGCCGCCA | 5467 |
| 1684 | GTACTGGCCGAGCCGCCGCC | 5466 |
| 1685 | AGTACTGGCCGAGCCGCCGC | 5465 |
| 1686 | GAGTACTGGCCGAGCCGCCG | 5464 |
| 1687 | GGAGTACTGGCCGAGCCGCC | 5463 |
| 1688 | GGGAGTACTGGCCGAGCCGC | 5462 |
| 1689 | CGGGAGTACTGGCCGAGCCG | 5461 |
| 1690 | CCGGGAGTACTGGCCGAGCC | 5460 |
| 1691 | GCCGGGAGTACTGGCCGAGC | 5459 |
| 1692 | GGCCGGGAGTACTGGCCGAG | 5458 |
| 1693 | GGGCCGGGAGTACTGGCCGA | 5457 |
| 1694 | GGGGCCGGGAGTACTGGCCG | 5456 |
| 1695 | GGGGGCCGGGAGTACTGGCC | 5455 |
| 1696 | CGGGGGCCGGGAGTACTGGC | 5454 |
| 1697 | CGGCATAGTTCCCCGCCTTAC | 2002 |
| 1698 | GGCATAGTTCCCCGCCTTAC | 2003 |
| 1699 | GCATAGTTCCCCGCCTTACT | 2004 |
| 1700 | CATAGTTCCCCGCCTTACTC | 2005 |
| 1701 | ATAGTTCCCCGCCTTACTCT | 2006 |
| 1702 | TAGTTCCCCGCCTTACTCTG | 2007 |
| 1703 | AGTTCCCCGCCTTACTCTGC | 2008 |
| 1704 | GTTCCCCGCCTTACTCTGCT | 2009 |
| 1705 | TTCCCCGCCTTACTCTGCTC | 2010 |
| 1706 | TCCCCGCCTTACTCTGCTCT | 2011 |
| 1707 | CCCCGCCTTACTCTGCTCTA | 2012 |
| 1708 | CCCGCCTTACTCTGCTCTAC | 2013 |
| 1709 | CCGCCTTACTCTGCTCTACC | 2014 |
| 1710 | CGCCTTACTCTGCTCTACCT | 2015 |
| 1711 | ACGGCATAGTTCCCCGCCTT | 2001 |
| 1712 | CACGGCATAGTTCCCCGCCT | 2000 |
| 1713 | TCACGGCATAGTTCCCCGCC | 1999 |
| 1714 | GTCACGGCATAGTTCCCCGC | 1998 |
| 1715 | GGTCACGGCATAGTTCCCCG | 1997 |
| 1716 | CGGTCACGGCATAGTTCCCC | 1996 |
| 1717 | ACGGTCACGGCATAGTTCCC | 1995 |
| 1718 | CACGGTCACGGCATAGTTCC | 1994 |
| 1719 | ACACGGTCACGGCATAGTTC | 1993 |
| 1720 | CACACGGTCACGGCATAGTT | 1992 |
| 1721 | ACACACGGTCACGGCATAGT | 1991 |
| 1722 | CACACACGGTCACGGCATAG | 1990 |
| 1723 | TCACACACGGTCACGGCATA | 1989 |
| 1724 | ATCACACACGGTCACGGCAT | 1988 |
| 1725 | TATCACACACGGTCACGGCA | 1987 |
| 1726 | GTATCACACACGGTCACGGC | 1986 |
| 1727 | TGTATCACACACGGTCACGG | 1985 |
| 1728 | TTGTATCACACACGGTCACG | 1984 |
| 1729 | ATTGTATCACACACGGTCAC | 1983 |
| 1730 | CGGCCCGAGCCTCCGTGACGAGTGC | 146348 |
| 1731 | GGCCCGAGCCTCCGTGACGA | 146349 |
| 1732 | GCCCGAGCCTCCGTGACGAG | 146350 |
| 1733 | CCCGAGCCTCCGTGACGAGT | 146351 |
| 1734 | CCGAGCCTCCGTGACGAGTG | 146352 |
| 1735 | CGAGCCTCCGTGACGAGTGC | 146353 |
| 1736 | GAGCCTCCGTGACGAGTGCC | 146354 |
| 1737 | AGCCTCCGTGACGAGTGCCA | 146355 |
| 1738 | GCCTCCGTGACGAGTGCCAC | 146356 |
| 1739 | CCTCCGTGACGAGTGCCACC | 146357 |
| 1740 | CTCCGTGACGAGTGCCACCC | 146358 |
| 1741 | TCCGTGACGAGTGCCACCCC | 146359 |
| 1742 | CCGTGACGAGTGCCACCCCC | 146360 |
| 1743 | CGTGACGAGTGCCACCCCCT | 146361 |
| 1744 | GTGACGAGTGCCACCCCCTG | 146362 |
| 1745 | TGACGAGTGCCACCCCCTGC | 146363 |
| 1746 | GACGAGTGCCACCCCCTGCT | 146364 |
| 1747 | ACGAGTGCCACCCCCTGCTC | 146365 |
| 1748 | CGAGTGCCACCCCCTGCTCC | 146366 |
| 1749 | GCGGCCCGAGCCTCCGTGAC | 146347 |
| 1750 | TGCGGCCCGAGCCTCCGTGA | 146346 |
| 1751 | ATGCGGCCCGAGCCTCCGTG | 146345 |
| 1752 | TATGCGGCCCGAGCCTCCGT | 146344 |
| 1753 | CTATGCGGCCCGAGCCTCCG | 146343 |
| 1754 | CCTATGCGGCCCGAGCCTCC | 146342 |
| 1755 | TCCTATGCGGCCCGAGCCTC | 146341 |
| 1756 | CTCCTATGCGGCCCGAGCCT | 146340 |
| 1757 | GCTCCTATGCGGCCCGAGCC | 146339 |
| 1758 | GGCTCCTATGCGGCCCGAGC | 146338 |
| 1759 | GGGCTCCTATGCGGCCCGAG | 146337 |
| 1760 | TGGGCTCCTATGCGGCCCGA | 146336 |
| 1761 | ATGGGCTCCTATGCGGCCCG | 146335 |
| 1762 | CATGGGCTCCTATGCGGCCC | 146334 |
| 1763 | CCATGGGCTCCTATGCGGCC | 146333 |
| 1764 | TCCATGGGCTCCTATGCGGC | 146332 |
| 1765 | CTCCATGGGCTCCTATGCGG | 146331 |
| 1766 | CCTCCATGGGCTCCTATGCG | 146330 |
| 1767 | CTGGGAGGGGATCCCTCACCGAGAG | 3328 |
| 1768 | TGGGAGGGGATCCCTCACCG | 3329 |
| 1769 | GGGAGGGGATCCCTCACCGA | 3330 |
| 1770 | GGAGGGGATCCCTCACCGAG | 3331 |
| 1771 | GAGGGGATCCCTCACCGAGA | 3332 |
| 1772 | AGGGGATCCCTCACCGAGAG | 3333 |
| 1773 | GGGGATCCCTCACCGAGAGT | 3334 |
| 1774 | GGGATCCCTCACCGAGAGTT | 3335 |
| 1775 | GGATCCCTCACCGAGAGTTA | 3336 |
| 1776 | GATCCCTCACCGAGAGTTAG | 3337 |
| 1777 | ATCCCTCACCGAGAGTTAGA | 3338 |
| 1778 | TCCCTCACCGAGAGTTAGAA | 3339 |
| 1779 | CCCTCACCGAGAGTTAGAAA | 3340 |
| 1780 | CCTCACCGAGAGTTAGAAAA | 3341 |
| 1781 | CTCACCGAGAGTTAGAAAAG | 3342 |
| 1782 | TCACCGAGAGTTAGAAAAGC | 3343 |
| 1783 | CACCGAGAGTTAGAAAAGCT | 3344 |

Hot Zones (Relative upstream location to gene start site)
650-1600
1900-2200
2900-3250
3800-4350
4800-6350
6500-7050

### Examples

[0321] In FIG. 26, Both KR1 (51) and KR2 (52) demonstrated a dose-dependent inhibition response in BxPC3 (human pancreatic cancer cell line), albeit the dose response in KR1 (51) was more subtle. As would be expected, both KR1 (51) and KR2 (52) at 5 μM showed the lowest inhibition while KR1 (51) and KR2 (52) at 30 μM showed the greatest inhibition. Both KR1 (51) and KR2 (52) (FIG. 28 and FIG. 29) fit the independent and dependent DNAi motif claims.

[0322] In FIG. 27, A549 (human lung cancer cell line), KR1 shows significant (P<0.05) inhibition at 10 μM. Neither KR0525 nor the negative control demonstrates significant inhibition. Only KR1 (FIG. 28) fits the independent and dependent DNAi motif claims. KR0525's (FIG. 29) lack of inhibition is attributable to: 1) the linear base of the secondary structure either prior to or at the base of the hairpin does not contain a CG pair, 2) its secondary structure does not contain four nucleotides in its base and 3) it is located too far upstream from the KRAS transcription start site (10,265 bases upstream).

[0323] The secondary structures for KR1 and KR2 are shown in FIGS. 28 and 29. Sequence 51 (KR1) is shown in FIG. 28 and Sequence 52 (KR2) is shown in FIG. 29.

[0324] The secondary structure for KR0525 is show in FIG. 30. Sequence 53 (KR0525)—No CG in 5′ linear section of the base either prior to or in the base of the hairpin; does not contain 4 nucleotides in the base; located too far from the start site

Genetic Code (5′ Upstream Region)

(SEQ ID NO: 11955)

TAATCAACAAAGCATTCATGGAGAAAATAGGTCTTATTCTAAATCTTGAA
TGAGAGAGAATTGTAGCAAACAGAAAGACAAAAAGGTGCTGGGTGAGAAA
AGGAGCAGAGACATAAATAAAATATCCAATTTTAAGGGTATAGAGAGGGG
ATTCACTCAAGGAGGGGAGACCATCTATCTGCTTTGAGAAGCTGGGAAAC
AAAGTCATAGGGTCAGGATGGTGCCTGACTATGGATGCTCTCAAAAGCTA
GGCACCAAGGATTTGGACTGGATTCAGCTGGATATAAGAAGTTATTACAG
ACTTGGAAGCAAGATTAAGTCTCCGGGAAGGGGAGACTTAACTGGGACCA
GAGATCATTTTCCCCTATAATTTTAAAGGTACTTATCATCTTTAGGTACT
CATTAGGTACTTAGCTTGTAACTCTTTCCACTGTTCAAATATATACCCAG
TATGCATGTAGCCTATATGGAGCAGGCACAGAGTAAATGTTTGATGATGA
TAAAAGACATGCGGAAGAAAGGTTAATTTGGCAACATCATAAAACTGAAT
TGAGACAAAGAAAGCCAGGAGGTAGGAAAGTCAATGAAGAAGTTATTCCA
GAAATGTAGCTGAGAAGGAAGGAATACAGAAGAGGCAGATATGGGAAAAT
ACTCAGGAAGTATAATTAAAAGGAGCTGTGACTAATTTTAATAAGGACTG
GGTTAAAAATTAAGTTTTCATGTCTAAATGTTCTGGAGGACCATGATGTC
ACTCAGGTAAGATGGAGGAATTGAGAGAGGGAATTCGTTAGAGGGAATAA
CATGGGGAATTTGGCTTTGGACAGGCATTTGCCATGATAACAGAATATTC
ATTTAGAAATGGTCCAGGAAATTGGTTTGATGAGAATGAAGTGCCTGTGA
AGAGAGAGGACTGAAGCTTGTTATAATTTCATTCACTTCAGGAATATTTA
CAGAGGACCCAAATGTGCTAAGAACTATGAAAACATAGAATTAAAAGAAA
TGGGCCTGGAATAATTTACAACCTAGTAAAGCAGTTATGGGAAAACATAT
TTGCAAAAAAGGTATACAAAGTATAATGAAATAAGTGTCCAGTAAGGATA
AAGTGCAGAGTAAGTGAATTAAGCAGCACCCATTCATGTGTTCAAATTCC
TGCCAGAGTCAAAAGGTTGTGCTGAAGTAGAGTCCATGAAAGCATCGTAG
ATGGCTCCTCCTGCTCAAGTTCCCCTGCTCTGCGTCCTGCTACTCTGGCC
ACAACCGTCTGGACCCAGGGTTGACACACAAACAAACACAATAATCTTTT
AGCCAGACATAAAGAAGGCCAGCCACCAATCAGGAAAATTGTGTCCCATA
AAGGCCCTTCCTATTGAACAGTGAATGACAGACATGGCCAGATCTTCTCT
CTTGGAATGCTTTGAATGTTAGTCACAGAGAGTGACCACTAGAAGCACAG
ATAGCAGTAGAAGCTAAGACTACATGAAAAAGCAGTGGACAGATGGTGAT
TTATGAGAATGGCAAAATTACTAGAGTCATAGGCAATGGATACTTGTTAA
TGAAGGGATGAGCAGGGCCCCACAGCCTGTTGCTGGCTCACAAGTGCAGT
TGATTGCTGGACTGAACAGCAGCTCTCCGCCTGATGATAGGGTTTTTTAA
AGTGTCCTTATTGCCTTAAAGTAAATCCTCAGCATTTGCAGTGCTCTGAG
GGTGTCCTAGCATTTTATACCTTTTTTCTAAGAGCCCAGGTAACATAAGG
GTACTCCTGTTGTTCTGGCTTTAATTCTATCTGCAGAAGAGGGTTTCTTG
TGAAAGAAAGGGTCAGTATGGTCTTTTATCTGTACAGCAGATAAAAAGGG
TATGTACGTGCACACCTTTGTACGTGGCTGCCTTCCCAGGACAGTCTGAC
AGTAGAGGGTAGAAACTTCAGTTGTAGCTGAGAGCAGGCCTGGAATCCCC
ATGCTTATACTTTTTATTTCCTCCCCCCTTTCCCATTGTGATCACAGGCT
ACTTCAGTGTGCTTGTCCTTGGAGAGAGCAAGGGAAGGGAGAGCCAGGGA
GACTGTTCAAGGGAGCCACCAGGCTCGAGAAAGAGGAACCCCTGAAGACA
GTAGAAAGTGCAGGTGCCAAGAATTTGAATATCTACATCAGAGTTTCTCA
ATGTGCACACAGTGAACTACCAGTTTAGGATCATTTGATTTGCTAAAAAT
GAAGATTACTGGTCTACCTTAGACCAACTGAATAAAATATCTGGGTGAGG
GGCCTAGGAACTTGCATTTTTGGTAGGCATGGCAGGTGATTCCTAAAGCA
TTTACCCTTGAGACCTCTATGTTAAGGAAAGAAAGGTAATGTTGCAAGGA
GGTGGTGCCGGCTTCTAAGAAAGTACCCAGGACTGAACGGCAGAAAGACC
TGACATACCATATGTATAAATTGCTGTGGAAGTGAAAAGGAAAGAGAAAG
TGTCTGAGGTAAAACTGGAGTGTGGGGTGCGTGGAACAAATGGTTGGATG
CAGATTTGCTTTACGAATCATGAGCCTAGATGATAACTGAGACCATGTGG
ATGGATTAGGTTTCTGCTAATGCCAGAATTTTTATAATCAGCATAAAAGT
GCTATATAAAGCTTTCCCCTCTTCTATATTATAGTCCTTTTAAGATGTAT
GGAACATCAACTATAGGAAGAACATCATATTCACAGCTGTAAGAGGAAAC
AAGAACTTATCATGCACTTGATGTTGTACAAAATAAATCTGTGATTTATG
CTTGAGTGACCACAAAGTAGCATACACATAAGCGCAAATTCATTCATTTA
AGAATTCCTTGTGTCTATTATGTACGAGATAAGTATCTCTGAGCTGCACG
GAATGTGGCTTATCAGAAGGTGACCTAAGTTTCAAAGCAGATTTTGTTAA
GATGAAGACAGAGATTGACAGGAGGTTTAAGACACTCTGTCTAAAGTAAA
GATTTAGAGTCACAGAGTTCATGGATTAGGATTTAGAATCCACAGAGGGT
CCACAGATTCACTCATTCAACATTCCATAAATATTTATTGAATGCCTTTT
TGTGTCAGAGACTGTCTTAGGTGCTGGAAATTTAGCAGTAAATGAAACAG
ACCAAAACCCATGCCCTCATGGAGCTTACATTCTGATGGTAGAGAGACAA
GAAAACAAAATAGATAGTGTATTATTGAAGGTGATGAGAGCTCTGGAGAA
AAAGTAGGAAAAGAGACAGATCTGGGACAAGGGCGAAATTACAGTATCAA
AGATGATCTTTTTAGGGAAGATCTCCTTTTAAAAACACTTTGGAACAAAG
ATTTAAATGAGGTGCCAGAGGGGTAGCAAGTGCATATTCCCTGAGGAAGA
CGCCTGCCTGGCATTTTCAAGGAACAGCCAGTAACCAATGTTTATCTACG
TAAGTAAGGAAGGGAGAACAGTAGGATGAGAGTTCAGAGAAGAGGGTAGG
GGATATCAAATAATTTAAGGCCATGTAGGATTTTTGAGAAGAATTTTGCT
TTTATGTCAAGTGGAATGAGGGCCACTGATGATCTGGGAGTAGAGTGACT
ATGATCCGACATGAAGTATACTCCATTTTTTAACTATGTGAACTTGTGCC
AACGTTTTAACCTCTAAATCTGTTTCGTCATTTGTAAAACGGTAAAAAGT
ATTTTACCTCATAAGGTTGTCGTGATGATTAAATAAGATGATACGATAAG
TGCAAAAGATTTAGCTTGTACTTAACATAGAGTAGGCACATTTTCTCCCC
TTCCCTGTCTTTCACTTTTCTCTTCTGCCCCTTCCACCTGGCGCTAGGAG
GGGGAGACTGGAATAAACCTTGCAGATTACAGCCCGTGTAAGAGTAGAAA
GGAAAGGATGACAGTTGATGTAAAGCCTTGGTTAACAGACATAATAGCTG
GGATTTAAATTCAGCTTTATTGGTGGTTTATGATGTGGACTAGAGGAATG
GAACTGAAAGTCTCGGAGGAGGGGCGATCCTATCAGGTACAGGCGCTGCT
TTTCCAGCCCTCAATCCTCAAGACTCTCCCAAGATACATTTCTAGGTAGT
TTATCAACACAGACTCCGGGTATGCTAGCATGTTTAATTGCCCCATTGTT
TAATGTCTTAACTCCACGAACTTTAACTGATTAATCTGTCTTCTAATTAA
TGTTTGAATGACTCTCCTCAGGTCTAAACTACCAAGGCCATCTCTACTTA
AAAACAGTTGTCTTTTGTTTGTGATTTCAGGGGCCCTGGGTATAAGCGAA
GTCCCTGTTTAGAGACCTTGTGATGGGTTCAAAATATCAAGAAAGATAGC
AAAATATCACAAGCCTCCTGACCCGAGAAGATTAGCGTTGAAAGGGTCTG
TCGTGTTTGTTTGGGCCTGGGGCTAAATTCCCAGCCCAAGTGCTGAGGCT
GATAATAATCGGGGCGGCGATCAGACAGCCCCGGTGTGGGAAATCGTCCG
CCCGGTCTCCCTAAGTCCCCGAAGTCGCCTCCCACTTTTGGTGACTGCTT
GTTTATTTACATGCAGTCAATGATAGTAAATGGATGCGCGCCAGTATAGG
CCGACCCTGAGGGTGGCGGGGTGCTCTTCGCAGCTTCTCTGTGGAGACCG
GTCAGCGGGGCGGCGTGGCCGCTCGCGGCGTCTCCCTGGTGGCATCCGCA
CAGCCCGCCGCGGTCCGGTCCCGCTCCGGGTCAGAATTGGCGGCTGCGGG
GACAGCCTTGCGGCTAGGCAGGGGGCGGGCCGCCGCGTGGGTCCGGCAGT
CCCTCCTCCCGCCAAGGCGCCGCCCAGACCCGCTCTCCAGCCGGCCCGGC
TCGCCACCCTAGACCGCCCCAGCCACCCCTTCCTCCGCCGGCCCGGCCCC
CGCTCCTCCCCCGCCGGCCCGGCCCGGCCCCCTCCTTCTCCCCGCCGGCG
CTCGCTGCCTCCCCCTCTTCCCTCTTCCCACACCGCCCTCAGCCGCTCCC
TCTCGTACGCCCGTCTGAAGAAGAATCGAGCGCGGAACGCATCGATAGCT
CTGCCCTCTGCGGCCGCCCGGCCCCGAACTCATCGGTGTGCTCGGAGCTC
GATTTTCCTAGGCGGCGGCCGCGGCGGCGGAGGCAGCAGCGGCGGCGGCA
GTGGCGGCGGCGAAGGTGGCGGCGGCTCGGCCAGTACTCCCGGCCCCCGC
CATTTCGGACTGGGAGCGAGCGCGGCGCAGGCACTGAAGGCGGCGGCGGG
GCCAGAGGCTCAGCGGCTCCCAGGTGCGGGAGAGAGGTACGGAGCGGACC
ACCCCTCCTGGGCCCCTGCCCGGGTCCCGACCCTCTTTGCCGGCGCCGGG
CGGGGCCGGCGGCGAGTGAATGAATTAGGGGTCCCCGGAGGGGCGGGTGG
GGGGCGCGGGCGCGGGGTCGGGGCGGGCTGGGTGAGAGGGGTCTGCAGGG
GGGAGGCGCGCGGACGCGGCGGCGCGGGGAGTGAGGAATGGGCGGTGCGG
GGCTGAGGAGGGTGAGGCTGGAGGCGGTCGCCGCTGGTGCTGCTTCCTGG
ACGGGGAACCCCTTCCTTCCTCCTCCCCGAGAGCCGCGGCTGGAGGCTTC
TGGGGAGAAACTCGGGCCGGGCCGGCTGCCCCTCGGAGCGGTGGGGTGCG
GTGGAGGTTACTCCCGCGGCGCCCCGGCCTCCCCTCCCCCTCTCCCCGCT
CCCGCACCTCTTGCCTCCCTTTCCAGCACTCGGCTGCCTCGGTCCAGCCT
TCCCTGCTGCATTTGGCATCTCTAGGACGAAGGTATAAACTTCTCCCTCG
AGCGCAGGCTGGACGGATAGTGGTCCTTTTCCGTGTGTAGGGGATGTGTG
AGTAAGAGGGGAGGTCACGTTTTGGAAGAGCATAGGAAAGTGCTTAGAGA
CCACTGTTTGAGGTTATTGTGTTTGGAAAAAAATGCATCTGCCTCCGAGT
TCCTGAATGCTCCCCTCCCCCATGTATGGGCTGTGACATTGCTGTGGCCA
CAAAGGAGGAGGTGGAGGTAGAGATGGTGGAAGAACAGGTGGCCAACACC
CTACACGTAGAGCCTGTGACCTACAGTGAAAAGGAAAAAGTTAATCCCAG
ATGGTCTGTTTTGCTTGGTCAAGTTAAACCCGAAGAAAACCCGCAGAGCA
GAAGCAAGGCTTTTTCCTTGCTAGTTGAGTGTAGACAGCAATAGCAAAAA
TAGTACTTGAAGTTTAATTTACCTGTTCTTGTCCTTTCCCCTATTTCTTA
TGTATTACCCTCATCCCCTCGTCTCTTTTATACTACCCTCATTTTGCAGA
TGTGTTCTACATCTCAAGAGTTATTACAGTACTCCAAAACAGCACTTACA
TGATTTTTTAAACTTACAGAGGAATTGTAGCAATCCACCAGCTAACCGCC
TGAAATAGACTTAAACATGTGCATCTCCTTTTTTTTTTTTTTTTTGAGAC
ACAGTCTCGCTCTGTTGCCCAGGCTGGAGTGCAATGGCGCGGTATCGGCT
CACTGAAACCTCCGCCTCCTGGGTTCAAGCAATTCTCCTGCCTCAGCCTC
CCGAGTAGCTGGGACTAGTAGGTGCACGCCACCATGCCCAGCTAATTTTT
GTATTTTTAGTAGAGACAGAGTTTCATCATGTTGGTCAGGATGGTCTCCA
TCTGCTCTGTTGCCCAGGCTGGAGTGCAGTGGCGCCGTCTCGGCTCACTG
CAACCTCTGCCTCCTGCATTCAAGCAATTCTCCTGCCTCAGCCTCCCGAA
TAACTGGGATTACAGGTGTCTGCTGCCATGCCCGGCTAATTTTTTGTATT
TTTAGTAGAGACGGGGGTTTCACCATGTTGGTCAGGCTGGTCTAGAACTC
CTGACCTCGTGATCTGCCCGCCTCGGCCTCCCACAGTGGCATGTGCATCT
TATAGCTGAAGTCTAAGCCTTCTTAAATCTTGAGATCCATCAAAACAGAC
AGGTTTTCTAATTGTTATACAATGTATATGTTATGTTTATAATAGAAATC
ATTTTACAAATAAGTTATAAATGGGAAAGGTCTATTTGTAATTATCAGCT
CAGAATTAACCATAAAACTGGTGTCACTGAAGTGACTGAGGTCCAAAATG
CTGACTCTGCATGTTATAGACTACAGATATCAAATATGGTTGCTAACAAT
AGTTTACTTTGAGACTGTAGCCATCCACAGTATATTTGCTTTTAAGAGAT
GGTAGATGGTAATTCAGTTTTATGAAAAATAAAAATGAATTTTCTTCCAT
TACAAAATTGTTGGATTCGAGTCCAGTCCACTCCTTACTAGCTTTTCTAA
CTCTCGGTGAGGGATCCCCTCCCAGCCCATGATCTTCATTTGGTAAGACT
CCTTTGGAACCCAGTTCTCTCTAGTGGATTTAAATGTGATTTGGTTTTAA
AAATCTCATTCAAGGAATTTTTTTTTTTTCTGGAAACAACCACCGCATAA
ACAAGTAAACCGGAAGATACATGTGGCTCTGAATTCATATATATACACAA
ACTCTAATCCAATGTCTGTCCACAGTATTTCCTAGGCTAGTAAACTTTTT
GGCCTTAACGACCCCTCTACCCTCTTTGTTTTTTTGAGAGAGAGAGTCTC
ACTCTGTCACCCAGGCCGGAATGCAGTGGCGCGATCTCGGCCCGCTACTA
CCTCCGACTCTCAGGCTCAAGCGATTCTCCCGCCTCAGCTTCCCGAGTAG
CCGGGATTACAGGCTCCCGCCACCGGGCTAATTGTATTTTTAGATACGGG
ATTTCACCATGTTGGCCAGGCTGGTCTCGACCTCCTGACCTCAGGTGATC
CGCCCGCCTAAGCCTCCCAAAGTGCTGGGATTACAGGCCACCACACCCGG
CCTACACTCTTAAAAATTATCGAAGGGGCCGGGCACATTGGCTCTTATCT
GTAATCCCAGCACTTTGGGAGACTGAGGCGGGAGGATCGCTTGAGGCCAG
GAGTTGGAGACCAGCGTACTCAACATAGTGAGACCTTGTTATAAAGAAAA
AAAAAATCCAGGATTAAAAAAAATCTTTGATTTGTTTGGGATTTATTAAT
ATTTACCGTATTGGAAATTAAAACAATTTTTTAAAATGTATTCATTTAAA
AATAATAAGCCCATTACTTGGTAACATGAATAAAATATTTTATGAAAAAT
AACTATTTTCCAAAACAAAACCAAAACTTAGAAAAGTGGTATTGTTTCAC
ACTTCAGTAAATCTCTTTAATGATGTGGCTTAATAGAAGATATGGATTCT
TATATCTGCATCTGCATTCAATCTATTATGATCACACATCTGGAAAACTT
GTGAAAGAATGGGAGTTAAAAGGGTAAAGGACATCTTAATGTTATTATGA
AAACAGTTTTGACCTCTTGCACACCAGAAAAGTCTTAGTAACCTGAGGGG
TTCCTAGACCACATTTTGAGAACTGTTTTAGGCTATGCAAACTGGTTGGG
GGGAGGTTGGGGTAGGCAGAGAGCTAGAAGATACATTTTAGTGTAATTCT
CCTCATCTATTCCTAATTGCTTTGGCCTACATTTGAAATAAAGCGTGGAG
GCAAACGGGATAAGATACATGTTTGTAGTGGTTGTTAACTTCACCCTAGA
CAAGCAGCCAATAAGTCTAGGTAGAGCAGAGTAAGGCGGGGAACTATGCC
GTGACCGTGTGTGATACAATTTTTCTAGCCTGTGGTGCTTTTTGCGGCAG
GGCTTAGGAGTAAGGTTAGTATGTTATCATTTGGGAAACCAAATTATTAT
TTTGGGTCTTCAGTCAATTATGATGCTGTGTATATTTAGTGTTTATCTAC
AATATATGCACATTCATTAATTTGGAGCTACTCATCCTATAATAAATAGT
TGTGCATTTACTCCCATTTTTTTCTGCATTTCTCTCCTTATTTATAATTA
TGTGTTACATGAGGGAAAGGAGGTGAAATTAAACATTCATATTATTTCAA
AAAATTTGAAACAACTAACTAAAAAATATGTTTTATTTTCTGTATGGTGT
TTGTTATACAATCTGTCAATATTCATGCACCTCTTGGGAGACAGTGTATG
AAAAGCAAAGAGTAACAGTCACATGGATTACTGATTACTGAGATATATTC
ACTTGCATCTTTTTTTTTTTTTGAGACGGAGTGGCTCTGTCGCCCAGGCT
GGAGTGCAGTGGCGTGATCTCGGCTCACTGCAAGCTCCGCCTCCTGGGTT
CACGCCATTCTTCTGCCTCAGCCTCCCAAGTAGCTGGGACTACAGGCGCC
CGCCACCACGCCCGGCTAATTTTTTTATATTTTTAGTAGAGACGGGGTTT
CACCGGGTTAGCCAGGATGGTCTTGATCTCCTGACCTCGTGATCCACCCT
CCTCGGCCTCCCAAAGTGCTAGGATTATAGGCGTGAGCCACCGTGCCCGG
CTCACTTGCATCTCTTAACAGCTGTTTTCTTACTAAAAACAGTGTTTATC
TCTAATCTTTTTGTTTGTTTGTTTGTTTTGAGATGGAGTCTTACTCCGTC
ACCCAATCTGGAGTGCAGTGGCGTGATCTGGGCTCACTGCAACCTCTGCC
TCCCGGGTTCAAGTGATTCTCCTTCCTCAGCCTCCCCAGTAGCTAGGACT
ACAGGAGAGCGCCACCACGCCTGATTAATTTTTGTATTTTTAGTAGAGAG
AGGGTTTCACCATATTGGCCAGGCTGGTCTTGAACTCCTGGCCTCAGGTG
ATCCACCCGCCTTGGCCTCTGAAAGTGCTGGGATTACAGGCATGAGCCGC
CGCACCCGGCTTTCTAATCTTTATCTTTTTTTGTGCAGCGGTGATACAGG
ATTATGTATTGTACTGAACAGTTAATTCGGAGTTCTCTTGGTTTTTAGCT
TTATTTTCCCCAGAGATTTTTTTTTTTTTTTTTTTTTTTGAGACGGAGTC
TTGCTCTATCGCCAGGCTGGAGTGCAGTGGCGCCATCTCGGCTCATTGCA
ACCTCGGACTCCTATTTTCCCCAGAGATATTTCACACATTAAAATGTCGT
CAAATATTGTTCTTCTTTGCCTCAGTGTTTAAATTTTTATTTCCCCATGA
CACAATCCAGCTTTATTTGACACTCATTCTCTCAACTCTCATCTGATTCT
TACTGTTAATATTTATCCAAGAGAACTACTGCCATGATGCTTTAAAAGTT
TTTCTGTAGCTGTTGCATATTGACTTCTAACACTTAGAGGTGGGGGTCCA
CTAGGAAAACTGTAACAATAAGAGTGGAGATAGCTGTCAGCAACTTTTGT
GAGGGTGTGCTACAGGGTGTAGAGCACTGTGAAGTCTCTACATGAGTGAA
GTCATGATATGATCCTTTGAGAGCCTTTAGCCGCCGCAGAACAGCAGTCT
GGCTATTTAGATAGAACAACTTGATTTTAAGATAAAAGAACTGTCTATGT
AGCATTTATGCATTTTTCTTAAGCGTCGATGGAGGAGTTTGTAAATGAAG
TACAGTTCATTACGATACACGTCTGCAGTCAACTGGAATTTTCATGATTG
AATTTTGTAAGGTATTTTGAAATAATTTTTCATATAAAGGTGAGTTTGTA
TTAAAAGGTACTGGTGGAGTATTTGATAGTGTATTAACCTTATGTGTGAC
ATGTTCTAATATAGTCACATTTTCATTATTTTTATTATAAGGCCTGCTGA
AAATG

[0325] 7) MTTP. Microsomal triglyceride transfer protein is an an essential chaperone for the biosynthesis/lipoprotein assembly of apolipoprotein B (apoB)-containing triglyceride-rich lipoproteins Inhibition of MTTP prevents the assembly of apo B-containing lipoproteins by inhibiting chylomicrons and VLDL synthesis. As a result, decreases in plasma levels of LDL-C are observed (Shoulders et al., Hum Mol Genet 2 (12): 2109-16). Patients carry mutations in the MTTP gene exhibit abetalipoproteinemia resulting from the loss of its lipid transfer activity.

[0326] MTTP is also recognized to play a role in the biosynthesis of CD1, glycolipid presenting molecules, as well as in the regulation of cholesterol ester biosynthesis. Recently, MTTP has been implicated in the propagation of hepatitis C virus, where the virus hijacks lipoprotein assembly for its secretion. Therefore, MTTP is a good target to lower plasma lipids and treat disorders characterized by higher production of apoB-containing lipoproteins such as atherosclerosis, metabolic syndrome, familial combined hyperlipidemia, homozygous and heterozygous familial hypercholesterolemia and hypertriglyceridemia (reviewed in Hussain et al. Nutrition & Metabolism 2012, 9:14). MTTP is also recognized to be involved in the immune response against foreign lipid antigens, such that targeting it may also be useful for modulating the inflammatory response during T cell mediated processes such as inflammatory bowel disease, autoimmune hepatitis and asthma (Hussain et al., Curr Opin Lipidol 2008, 19:277-284). Current therapies that inhibit MTTP without increasing hepatic lipids and plasma transaminases are lacking.

[0327] Protein: MTTP Gene: MTTP (Homo sapiens, chromosome 4, 100485240-100545154 [NCBI Reference Sequence: NC_{—}000004.11]; start site location: 100496067; strand: positive)

Gene Identification

| | |
|---|---|
| GeneID | 4547 |
| HGNC | 7467 |
| HPRD | 01144 |
| MIM | 157147 |

Targeted Sequences

| | | Relative |
|---|---|---|
| | | upstream |
| Sequence | | location to |
| ID No: | Sequence (5′-3′) | gene start site |
| 1784 | AACCGCCGTAGCCTCCACTGCG | 10855 |
| 1870 | TGGCCGCAGTTCGATGACGTAAGACG | 10828 |

Target Shift Sequences

| | | Relative |
|---|---|---|
| | | upstream |
| Sequence | | location to gene |
| ID No: | Sequence (5′-3′) | start site |
| 1784 | AACCGCCGTAGCCTCCACTGCG | 10855 |
| 1785 | ACCGCCGTAGCCTCCACTGC | 10856 |
| 1786 | CCGCCGTAGCCTCCACTGCG | 10857 |
| 1787 | CGCCGTAGCCTCCACTGCGT | 10858 |
| 1788 | GCCGTAGCCTCCACTGCGTA | 10859 |
| 1789 | CCGTAGCCTCCACTGCGTAA | 10860 |
| 1790 | CGTAGCCTCCACTGCGTAAC | 10861 |
| 1791 | GTAGCCTCCACTGCGTAACT | 10862 |
| 1792 | TAGCCTCCACTGCGTAACTA | 10863 |
| 1793 | AGCCTCCACTGCGTAACTAC | 10864 |
| 1794 | GCCTCCACTGCGTAACTACC | 10865 |
| 1795 | CCTCCACTGCGTAACTACCG | 10866 |
| 1796 | CTCCACTGCGTAACTACCGC | 10867 |
| 1797 | TCCACTGCGTAACTACCGCC | 10868 |
| 1798 | CCACTGCGTAACTACCGCCC | 10869 |
| 1799 | CACTGCGTAACTACCGCCCC | 10870 |
| 1800 | ACTGCGTAACTACCGCCCCT | 10871 |
| 1801 | CTGCGTAACTACCGCCCCTG | 10872 |
| 1802 | TGCGTAACTACCGCCCCTGC | 10873 |
| 1803 | GCGTAACTACCGCCCCTGCC | 10874 |
| 1804 | CGTAACTACCGCCCCTGCCT | 10875 |
| 1805 | GTAACTACCGCCCCTGCCTC | 10876 |
| 1806 | TAACTACCGCCCCTGCCTCT | 10877 |
| 1807 | AACTACCGCCCCTGCCTCTG | 10878 |
| 1808 | ACTACCGCCCCTGCCTCTGG | 10879 |
| 1809 | CTACCGCCCCTGCCTCTGGG | 10880 |
| 1810 | TACCGCCCCTGCCTCTGGGA | 10881 |
| 1811 | ACCGCCCCTGCCTCTGGGAA | 10882 |
| 1812 | CCGCCCCTGCCTCTGGGAAT | 10883 |
| 1813 | CGCCCCTGCCTCTGGGAATT | 10884 |
| 1814 | CAACCGCCGTAGCCTCCACT | 10854 |
| 1815 | GCAACCGCCGTAGCCTCCAC | 10853 |
| 1816 | CGCAACCGCCGTAGCCTCCA | 10852 |
| 1817 | ACGCAACCGCCGTAGCCTCC | 10851 |
| 1818 | GACGCAACCGCCGTAGCCTC | 10850 |
| 1819 | AGACGCAACCGCCGTAGCCT | 10849 |
| 1820 | AAGACGCAACCGCCGTAGCC | 10848 |
| 1821 | TAAGACGCAACCGCCGTAGC | 10847 |
| 1822 | GTAAGACGCAACCGCCGTAG | 10846 |
| 1823 | CGTAAGACGCAACCGCCGTA | 10845 |
| 1824 | ACGTAAGACGCAACCGCCGT | 10844 |
| 1825 | GACGTAAGACGCAACCGCCG | 10843 |
| 1826 | TGACGTAAGACGCAACCGCC | 10842 |
| 1827 | ATGACGTAAGACGCAACCGC | 10841 |
| 1828 | GATGACGTAAGACGCAACCG | 10840 |
| 1829 | CGATGACGTAAGACGCAACC | 10839 |
| 1830 | TCGATGACGTAAGACGCAAC | 10838 |
| 1831 | TTCGATGACGTAAGACGCAA | 10837 |
| 1832 | GTTCGATGACGTAAGACGCA | 10836 |
| 1833 | AGTTCGATGACGTAAGACGC | 10835 |
| 1834 | CAGTTCGATGACGTAAGACG | 10834 |
| 1835 | GCAGTTCGATGACGTAAGAC | 10833 |
| 1836 | CGCAGTTCGATGACGTAAGA | 10832 |
| 1837 | CCGCAGTTCGATGACGTAAG | 10831 |
| 1838 | GCCGCAGTTCGATGACGTAA | 10830 |
| 1839 | GGCCGCAGTTCGATGACGTA | 10829 |
| 1840 | TGGCCGCAGTTCGATGACGT | 10828 |
| 1841 | ATGGCCGCAGTTCGATGACG | 10827 |
| 1842 | AATGGCCGCAGTTCGATGAC | 10826 |
| 1843 | AAATGGCCGCAGTTCGATGA | 10825 |
| 1844 | GAAATGGCCGCAGTTCGATG | 10824 |
| 1845 | CGAAATGGCCGCAGTTCGAT | 10823 |
| 1846 | TCGAAATGGCCGCAGTTCGA | 10822 |
| 1847 | TTCGAAATGGCCGCAGTTCG | 10821 |
| 1848 | GTTCGAAATGGCCGCAGTTC | 10820 |
| 1849 | GGTTCGAAATGGCCGCAGTT | 10819 |
| 1850 | GGGTTCGAAATGGCCGCAGT | 10818 |
| 1851 | CGGGTTCGAAATGGCCGCAG | 10817 |
| 1852 | GCGGGTTCGAAATGGCCGCA | 10816 |
| 1853 | TGCGGGTTCGAAATGGCCGC | 10815 |
| 1854 | TTGCGGGTTCGAAATGGCCG | 10814 |
| 1855 | ATTGCGGGTTCGAAATGGCC | 10813 |
| 1856 | CATTGCGGGTTCGAAATGGC | 10812 |
| 1857 | CCATTGCGGGTTCGAAATGG | 10811 |
| 1858 | TCCATTGCGGGTTCGAAATG | 10810 |
| 1859 | TTCCATTGCGGGTTCGAAAT | 10809 |
| 1860 | CTTCCATTGCGGGTTCGAAA | 10808 |
| 1861 | TCTTCCATTGCGGGTTCGAA | 10807 |
| 1862 | TTCTTCCATTGCGGGTTCGA | 10806 |
| 1863 | TTTCTTCCATTGCGGGTTCG | 10805 |
| 1864 | CTTTCTTCCATTGCGGGTTC | 10804 |
| 1865 | CCTTTCTTCCATTGCGGGTT | 10803 |
| 1866 | CCCTTTCTTCCATTGCGGGT | 10802 |
| 1867 | CCCCTTTCTTCCATTGCGGG | 10801 |
| 1868 | TCCCCTTTCTTCCATTGCGG | 10800 |
| 1869 | CTCCCCTTTCTTCCATTGCG | 10799 |
| 1870 | TGGCCGCAGTTCGATGACGTAAGACG | 10828 |
| 1871 | GGCCGCAGTTCGATGACGTA | 10829 |
| 1872 | GCCGCAGTTCGATGACGTAA | 10830 |
| 1873 | CCGCAGTTCGATGACGTAAG | 10831 |
| 1874 | CGCAGTTCGATGACGTAAGA | 10832 |
| 1875 | GCAGTTCGATGACGTAAGAC | 10833 |
| 1876 | CAGTTCGATGACGTAAGACG | 10834 |
| 1877 | AGTTCGATGACGTAAGACGC | 10835 |
| 1878 | GTTCGATGACGTAAGACGCA | 10836 |
| 1879 | TTCGATGACGTAAGACGCAA | 10837 |
| 1880 | TCGATGACGTAAGACGCAAC | 10838 |
| 1881 | CGATGACGTAAGACGCAACC | 10839 |
| 1882 | GATGACGTAAGACGCAACCG | 10840 |
| 1883 | ATGACGTAAGACGCAACCGC | 10841 |
| 1884 | TGACGTAAGACGCAACCGCC | 10842 |
| 1885 | GACGTAAGACGCAACCGCCG | 10843 |
| 1886 | ACGTAAGACGCAACCGCCGT | 10844 |
| 1887 | CGTAAGACGCAACCGCCGTA | 10845 |
| 1888 | GTAAGACGCAACCGCCGTAG | 10846 |
| 1889 | TAAGACGCAACCGCCGTAGC | 10847 |
| 1890 | AAGACGCAACCGCCGTAGCC | 10848 |
| 1891 | AGACGCAACCGCCGTAGCCT | 10849 |
| 1892 | GACGCAACCGCCGTAGCCTC | 10850 |
| 1893 | ACGCAACCGCCGTAGCCTCC | 10851 |
| 1894 | CGCAACCGCCGTAGCCTCCA | 10852 |
| 1895 | GCAACCGCCGTAGCCTCCAC | 10853 |
| 1896 | CAACCGCCGTAGCCTCCACT | 10854 |
| 1897 | AACCGCCGTAGCCTCCACTG | 10855 |
| 1898 | ACCGCCGTAGCCTCCACTGC | 10856 |
| 1899 | CCGCCGTAGCCTCCACTGCG | 10857 |
| 1900 | CGCCGTAGCCTCCACTGCGT | 10858 |
| 1901 | GCCGTAGCCTCCACTGCGTA | 10859 |
| 1902 | CCGTAGCCTCCACTGCGTAA | 10860 |
| 1903 | CGTAGCCTCCACTGCGTAAC | 10861 |
| 1904 | GTAGCCTCCACTGCGTAACT | 10862 |
| 1905 | TAGCCTCCACTGCGTAACTA | 10863 |
| 1906 | AGCCTCCACTGCGTAACTAC | 10864 |
| 1907 | GCCTCCACTGCGTAACTACC | 10865 |
| 1908 | CCTCCACTGCGTAACTACCG | 10866 |
| 1909 | CTCCACTGCGTAACTACCGC | 10867 |
| 1910 | TCCACTGCGTAACTACCGCC | 10868 |
| 1911 | CCACTGCGTAACTACCGCCC | 10869 |
| 1912 | CACTGCGTAACTACCGCCCC | 10870 |
| 1913 | ACTGCGTAACTACCGCCCCT | 10871 |
| 1914 | CTGCGTAACTACCGCCCCTG | 10872 |
| 1915 | TGCGTAACTACCGCCCCTGC | 10873 |
| 1916 | GCGTAACTACCGCCCCTGCC | 10874 |
| 1917 | CGTAACTACCGCCCCTGCCT | 10875 |
| 1918 | GTAACTACCGCCCCTGCCTC | 10876 |
| 1919 | TAACTACCGCCCCTGCCTCT | 10877 |
| 1920 | AACTACCGCCCCTGCCTCTG | 10878 |
| 1921 | ACTACCGCCCCTGCCTCTGG | 10879 |
| 1922 | CTACCGCCCCTGCCTCTGGG | 10880 |
| 1923 | TACCGCCCCTGCCTCTGGGA | 10881 |
| 1924 | ACCGCCCCTGCCTCTGGGAA | 10882 |
| 1925 | CCGCCCCTGCCTCTGGGAAT | 10883 |
| 1926 | CGCCCCTGCCTCTGGGAATT | 10884 |
| 1927 | ATGGCCGCAGTTCGATGACG | 10827 |
| 1928 | AATGGCCGCAGTTCGATGAC | 10826 |
| 1929 | AAATGGCCGCAGTTCGATGA | 10825 |
| 1930 | GAAATGGCCGCAGTTCGATG | 10824 |
| 1931 | CGAAATGGCCGCAGTTCGAT | 10823 |
| 1932 | TCGAAATGGCCGCAGTTCGA | 10822 |
| 1933 | TTCGAAATGGCCGCAGTTCG | 10821 |
| 1934 | GTTCGAAATGGCCGCAGTTC | 10820 |
| 1935 | GGTTCGAAATGGCCGCAGTT | 10819 |
| 1936 | GGGTTCGAAATGGCCGCAGT | 10818 |
| 1937 | CGGGTTCGAAATGGCCGCAG | 10817 |
| 1938 | GCGGGTTCGAAATGGCCGCA | 10816 |
| 1939 | TGCGGGTTCGAAATGGCCGC | 10815 |
| 1940 | TTGCGGGTTCGAAATGGCCG | 10814 |
| 1941 | ATTGCGGGTTCGAAATGGCC | 10813 |
| 1942 | CATTGCGGGTTCGAAATGGC | 10812 |
| 1943 | CCATTGCGGGTTCGAAATGG | 10811 |
| 1944 | TCCATTGCGGGTTCGAAATG | 10810 |
| 1945 | TTCCATTGCGGGTTCGAAAT | 10809 |
| 1946 | CTTCCATTGCGGGTTCGAAA | 10808 |
| 1947 | TCTTCCATTGCGGGTTCGAA | 10807 |
| 1948 | TTCTTCCATTGCGGGTTCGA | 10806 |
| 1949 | TTTCTTCCATTGCGGGTTCG | 10805 |
| 1950 | CTTTCTTCCATTGCGGGTTC | 10804 |
| 1951 | CCTTTCTTCCATTGCGGGTT | 10803 |
| 1952 | CCCTTTCTTCCATTGCGGGT | 10802 |
| 1953 | CCCCTTTCTTCCATTGCGGG | 10801 |
| 1954 | TCCCCTTTCTTCCATTGCGG | 10800 |
| 1955 | CTCCCCTTTCTTCCATTGCG | 10799 |

Hot Zones (Relative upstream location to gene start site)
10750-10900

### Examples

Genetic Code (5′ Upstream Region)

(SEQ ID NO: 11956)

TCTTGAAAATAATCTGTCCTCTCTATCTAGTTCCTTTAAATATCTTCTCT
CTCTCTCTGATATTCTGCAGTTTAATTATGATGTATCTACTTGTGTGTAT
GTGTGTTTTAAAAATTATCCTGCTTAAGACTTATTGAGCCTCGTGAATCT
GTGGATTGGTATCTGTGATAGGCAGACAATGGCTCCCCAAAGATCTTAAA
TGTCTTAATCTCCAGAACCTGTGATAGTCTAAGTTAAGGTTGTAGATGAA
ATTAAAGTTACCAATCCACAGACCTCAGGGTAAAAAGATTATCCTGGATT
ATTTAGGCAGGCCCAGTATAATCACAAGGATTCATAAAACGGAAGAGGGA
GACAGAAGAGATGGTCAGAGTGATATGAAGTAAAAAGGATTCAGCTTACT
CTTGCTGGATTTGTAAATGCAGGAAGGGACCACGAGTCAAGGAATGCAGG
TAGCTTCTAGAAGCTAGAAAAGGTAAGAAACAAATTCTCCCCTAAAGCCT
CCAGAAAGGGATACACCTGCCAATACTTTCATTTTATCCCTGTGAGACCA
GTGTTAGACTTCTGACCTCCAAGAGTATAAGACAATAAATCTGCTGTTTT
AAGCCACTAAGTTTTGTGGTAATTTGTTATGGTAGCTATGGAGAACTGAT
ACAGTGCCTTTCAATAGTTCTTGGAAATTCTTCAAATATATTCCCCAAAT
ATTGCCTTTGCACCACTCACTCTATCCTCTATATCTCTTGACCTCTCTTT
AACATTTTTTATTTTCTTATTTTGGTAATTATTTAAAACAATTGGCTTCT
TGTTCCACTTCAAATAAATTCATATTTTTATATCTACATATTAAGAATTA
GTTCATAAATGTAATTGTTGTATCGTATATACTTTAAAAGGAAAATTGCA
TTTATACTTGGATATTATTATATTTTAGGTTTTGAAATTTCTTTTTTTAA
ATGTCTGATAAATTTATTCTGATCAAAATTAAAATCTTATTGTATTTACA
GTAGTCTACTAAAAGAGTTTACATCAATTCTCTCCTTTAAATGCTAGCAA
TTCAGTTTTGTGTGGTCAAAGATAATTTAGAATCCTTTTATGGTAACTGA
TATGATACAAAGGATTTTTTTGGTTGTTGTCAAATTTGTATGTGCGTATA
TATGTATAGGGGGTAGAAAATTTGGTTAGTGACTCTATTTTGGAAAAATG
AATGTTCTTTTTGGAGTTTTAGATTCCCAGTGTTTCAAACCAAGTTTGCT
TTTGATAAGGAATTCAGTGAATCTTTATTTTCTCGTAGAGAATTTTTAAA
CAATACCTTTCAAAATATTGTATGTATTCCTATATAATTTTGCCTTGGAA
TAAAAAAAGTCATCACATTAAGAATATTTTTAACTTAAGAAATTTTTTCA
AGATTCTTTCAAAATGCTAACTCCCTCATTGATTTGAAAATACTTTTAGA
GTTTAAACTATTATGACCATGTAGGGATAACTTAAAGTGTCCTTCTAAAT
TTTTTTTTCATTAATGTCATGCTTCTTTCTAAGAACAAAGTGTTTCAATG
TTATAAACAGACTGTTTTTTCACATAGCTTTCATACATCCTGACTTTCTA
TATCTAGTAGGGTAATACATTTCCTTCCAACCTTTAGTGGGGTGAAGTTC
ATTTGTCTTCTAATCTAAGAAAATACGTTAACTCCTGACAACCTCTGACA
CTCAACAGAAACACAACTGTACTTTGGAATTAATCATCCATCTTTATTTC
ATAGTCTCCTTATTTATCAATGCAAATGGAAGTATAGCAAATATTTCACA
GTGTCATGTACTACCTAAGGAATTTCATTGCAATAGCATTGTTTTGAAAT
GTATCATTTGATTTTGATCTAACTATCATAGATCAGTTTTACCCCTGTAT
GTTCAGCCTGAATGTCTAACCACAATTTCACAAAAATCAAGGGCTCTGTT
AGTTTTCATACAAAATTGTGATGACTTATTATGAAGACAGTCCCAATTAA
CAATTGCATGTCATCTGTAAGAAATCAATTTTTTTCTCACTCCCCACCTG
TAATTTTTTTTAAGCAAAGAAGAATACTTGGGTCTAGGTTTCAAGGTTTA
TTTTTCTGTAGTCCTAATATCACTTCAGTAAATTAATCTGAGACTCATTT
TTCTAATATGTCAAATGACTGTTGTAAGGATTATTATAAAAACGTAAGGT
GATTAACAAAGTATGTAATTGTTCCATAGATGGCAGCTCTTGTTTTTTTA
CTGTGCTTTGCTTCTGCCCTGCTTCACATATTATGTAAAATAGCTGGTGA
GTTTTAGGAGGTAGTGCTCACATGTTTGCACAGTGTTTGCTGTGGACGAT
CAACAGTAACAGAAGAGCATACTTCTTCGATACACAGAGTTTACTGAATT
TGGAAAGGCTTTGGCATTCTTATGTCATCTGTAATGAAACAATCTCCAGA
AGTCTTTTCTAAAATGTCCTTGTAAAAAGAAAAAAGTTATGTTTATATTT
TATAAAAGGATGATGTTATTTATAACCAGCAGAAGCAGCCTTATTTGAAC
ATCTTATGTTGAAATTGCTACTTAATACAGTGACTCATAGGAGCTTTCTA
GTGGAAATCAAATGCTCAAATGAAATAGAATTTAGTTTGTTAGGCAATAG
TGATATGTCTTTTATTGGTTGGACTCTGGAAAACACTTGACAACGAATAG
TACTTTACCCGAAGGGCACGTATCATGCACCACATAGCCTAACCACAAAC
ATTAAAGGTCTTGTAACTGTGAGCCTCAAATGAAAATACATAAGGACAGC
TCTCATACAATCAAATACAATACAAACTAGCTTTTAATTTAAATAAATAT
GTAAGTAAAGTTCAAGTGACTATAATGATTTTATATCCCTATGTATGTAT
CACAGAAATTGTGGCAAACTGTAGAAATCTATTCAAATGGAAAGTAACAA
AGCACTTTCACATTGCCTTGTATTCAAAATCCCTACTCTTCATAAAAACT
TATATTTCTTTAACAAAGCTACTTTTCTGTTTAACTCCCGGAAAACTTCG
TATTTATAACTTAAGGGGGTTTCTCCAACCAAACAATTTATTTTTGCTAG
GTACTATAGCTATATTTTTTATACAAAATTTGTGACAGCAAATGAAATTC
TAATCCCAATAGAAGAACAAACAATTTTCATGTTTCGATCTTCATATATA
TAATTCAAGAGGAAATATGCTTAACTTTGTAGATTTTTACATTTTAAATT
GCATTGTGTCTGTATCAAGTCTACTATCTTTTACCTAGATTGTCTGGAAG
ATTTAAGCTCAAGGTTACGGTTTGAGAAAAGGGTTTTGAGAGTGACCAGG
ATAGATTTAAGAATTCATTTTATACTAAAATATGGCCATAAATATTTTTA
AATACATTCAAATAGCCCTTTGCTGGCACATTTTTTCCCTTCTTTGCCAA
AACATTCCCACAGGCGGCCTAAGTCACCTCATTTTATAGGTTTAGTAGGT
TTAGCAGGCTTTATGTGCTCTAGTAGGGTTAGTAGGTTTTGTTCATATCA
GGTCTCTCTCATGGGAGTTTCCAGGGACAAGGATTGCTTCAGTTAGTATG
GCCTTAGCCATACTAGGGTATTTGCTTTAATTCTACAGAAGTTTTCTAAT
TAATATTCTGTAGCAAAAGAACTAAGATCTGGAATTCCCCCTCTTAATCT
CTTCCTAGAAATGAGATTCAGAAAGGACAGGACTGCATCCAGCCTGTTTG
GGAACTCAGACAAATGTGTGTTGTCACAGACACAAATAGAGGTCTACTAT
GAAATAATTGGCTTGCTAGTGTGCTAATGACAGACAATGCTGATTTGCTC
CAACCTCATACAGTTTCACACATAAGGACAATCATCTATGTTTCATGAAA
GTTCTATCTACTTTAACATTATTTTGAAGTGATTGGTGGTGGTATGAATT
AACAGTTTAAATTTAAATCCTAAAATTCAGTGTGAATTTTTTATAATAGC
ATAAAAATTCAAAGATGTCCATACAAGAAAAATTAAAATTTGGTTAGGTT
TAGCAGAGTTTGAGAATCCTTACTACCCTCCCACATAGTATTGTAATGTG
AATATAGGCAGTTACTATTACAGGCATAATGATGATTATGTATTAAGCAG
AAAGAAGTATCACCACCAGTTTTTTTCTTTGAATGCCCCTCAGTACTTCT
GCATTTATAGGATGGTAGACTGGTTTGGTTTAGCTCTCAAAAGTGAAAAC
ATTTAAAGTTTCCTCATTGGGTGAAAAAAATTAAAAAGAGTGAGAGACTG
AAAACTGCAGCCCACCTACGTTTAATCATTAATAGTGAGCCCTTCAGTGA
ACTTAGGTCCTGATTTTGGAGTTTGGAGTCTGACCTTTCCCCAAAGATAA
ACATGATTGTTGCAGGTTCTGAAGAGGGTCACTCCCTCACTGGCTGCCAT
TGAAAGAGTCCACTTCTCAGTGACTCCTAGCTGGGCACTGGATGCAGTTG
AGGATTGCTGGTCAATATG

[0329] 8) ApoC III. Apolipoprotein C-III is a protein component of very low density lipoprotein (VLDL). APOC3 inhibits lipoprotein lipase and hepatic lipase; it is thought to inhibit hepatic uptake of triglyceride-rich particles (reviewed in Mendevil et al., Arteriosclerosis, Thrombosis and Vascular Biology 30 (2): 239-45). The APOA1, APOC3 and APOA4 genes are closely linked in both rat and human genomes. The A-I and A-IV genes are transcribed from the same strand, while the A-1 and C-III genes are convergently transcribed. An increase in apoC-III levels induces the development of hypertriglyceridemia. Two novel susceptibility haplotypes (specifically, P2-S2-X1 and P1-S2-X1) have been discovered in ApoAI-CIII-AIV gene cluster on chromosome 11q23; these confer approximately threefold higher risk of coronary heart disease in normal as well as non-insulin diabetes mellitus. Apo-CIII delays the catabolism of triglyceride rich particles. Elevations of Apo-CIII found in genetic variation studies may predispose patients to non-alcoholic fatty liver disease.

[0330] ISIS-APOCIIIRx is an antisense drug designed to reduce apolipoprotein C-III, or apoC-III, protein production and lower triglycerides. ApoC-III regulates triglyceride metabolism in the blood and is an independent cardiovascular risk factor. People who do not produce apoC-III have lower levels of triglycerides and lower instances of cardiovascular disease. ApoC-III is elevated in patients with dyslipidemia, or an abnormal concentration of lipids in the blood, and is frequently associated with multiple metabolic abnormalities, such as insulin resistance and/or metabolic syndrome. In human population studies, lower levels of apoC-III and triglycerides correlated with a lower rate of cardiovascular events. In certain populations, apoC-III mediates insulin resistance, which can make metabolic syndrome worse.

[0331] Protein: ApoC-III Gene: APOC3 (Homo sapiens, chromosome 11, 116700624-116703787 [NCBI Reference Sequence: NC_{—}000011.9]; start site location: 116701299; strand: positive)

Gene Identification

| | |
|---|---|
| GeneID | 345 |
| HGNC | 610 |
| HPRD | 00132 |
| MIM | 107720 |

Targeted Sequences

| | | Relative |
|---|---|---|
| | | upstream |
| | | location |
| Sequence | | to gene |
| ID No: | Sequence (5′-3′) | start site |
| 1956 | GAGTCGGTGGTCCAGGAGGGGCCGC | 1614 |
| 1957 | CTGCGGCTGAGGTGTCATTCGTGACTCAG | 4214 |
| 1992 | GCGGGCGGGTGAGACAGAAGCGCC | 4130 |
| 1993 | CCTCGCGAGCGTGGGTGCACGC | 3985 |
| 2028 | CGATGTCTCCCTCGAGATCACA | 3717 |
| 2054 | GGACGGACGGATATCTGAGGCCAG | 2195 |
| 2062 | CGTCCCCGCCACGTTGAAAGGC | 3954 |
| 2089 | TCTCGGACATGCTCAAATGGTGCAGGCG | 4080 |
| 2108 | CACCGACAGGAGCCAATAGTGCAACG | 4065 |
| 2127 | GTCCGGCAGAGGGACCCATGCTGACG | 4940 |
| 2136 | CGTGAGGCACATGTCCGTGTG | 3511 |
| 2170 | CAGATGCAGCAAGCGGGCGGGAGAG | 798 |
| 2176 | CCACGCTGCTGTCCCGCCAGCCCTGCAG | 848 |
| 2206 | ACCCGCCCCCACCCTGTGTGCCCCCACCC | 1276 |
| | GCCCCCACCCTGTGTGCCCCC | |
| 2225 | CGCTCAGAGCCCGAGGCCTTTG | 1352 |

Target Shift Sequences

| | | Relative |
|---|---|---|
| | | upstream |
| | | location |
| Sequence | | to gene |
| ID No: | Sequence (5′-3′) | start site |
| 1956 | GAGTCGGTGGTCCAGGAGGGGCCGC | 1614 |
| 1957 | CTGCGGCTGAGGTGTCATTCGTGACTCAG | 4214 |
| 1958 | TGCGGCTGAGGTGTCATTCG | 4215 |
| 1959 | GCGGCTGAGGTGTCATTCGT | 4216 |
| 1960 | CGGCTGAGGTGTCATTCGTG | 4217 |
| 1961 | GGCTGAGGTGTCATTCGTGA | 4218 |
| 1962 | GCTGAGGTGTCATTCGTGAC | 4219 |
| 1963 | CTGAGGTGTCATTCGTGACT | 4220 |
| 1964 | TGAGGTGTCATTCGTGACTC | 4221 |
| 1965 | GAGGTGTCATTCGTGACTCA | 4222 |
| 1966 | AGGTGTCATTCGTGACTCAG | 4223 |
| 1967 | GGTGTCATTCGTGACTCAGT | 4224 |
| 1968 | GTGTCATTCGTGACTCAGTC | 4225 |
| 1969 | TGTCATTCGTGACTCAGTCT | 4226 |
| 1970 | GTCATTCGTGACTCAGTCTC | 4227 |
| 1971 | TCATTCGTGACTCAGTCTCC | 4228 |
| 1972 | CATTCGTGACTCAGTCTCCT | 4229 |
| 1973 | ATTCGTGACTCAGTCTCCTC | 4230 |
| 1974 | TTCGTGACTCAGTCTCCTCC | 4231 |
| 1975 | TCGTGACTCAGTCTCCTCCT | 4232 |
| 1976 | CGTGACTCAGTCTCCTCCTC | 4233 |
| 1977 | ACTGCGGCTGAGGTGTCATT | 4213 |
| 1978 | AACTGCGGCTGAGGTGTCAT | 4212 |
| 1979 | AAACTGCGGCTGAGGTGTCA | 4211 |
| 1980 | CAAACTGCGGCTGAGGTGTC | 4210 |
| 1981 | TCAAACTGCGGCTGAGGTGT | 4209 |
| 1982 | GTCAAACTGCGGCTGAGGTG | 4208 |
| 1983 | GGTCAAACTGCGGCTGAGGT | 4207 |
| 1984 | AGGTCAAACTGCGGCTGAGG | 4206 |
| 1985 | GAGGTCAAACTGCGGCTGAG | 4205 |
| 1986 | GGAGGTCAAACTGCGGCTGA | 4204 |
| 1987 | TGGAGGTCAAACTGCGGCTG | 4203 |
| 1988 | CTGGAGGTCAAACTGCGGCT | 4202 |
| 1989 | CCTGGAGGTCAAACTGCGGC | 4201 |
| 1990 | TCCTGGAGGTCAAACTGCGG | 4200 |
| 1991 | GTCCTGGAGGTCAAACTGCG | 4199 |
| 1992 | GCGGGCGGGTGAGACAGAAGCGCC | 4130 |
| 1993 | CCTCGCGAGCGTGGGTGCACGC | 3985 |
| 1994 | CTCGCGAGCGTGGGTGCACG | 3986 |
| 1995 | TCGCGAGCGTGGGTGCACGC | 3987 |
| 1996 | CGCGAGCGTGGGTGCACGCA | 3988 |
| 1997 | GCGAGCGTGGGTGCACGCAT | 3989 |
| 1998 | CGAGCGTGGGTGCACGCATG | 3990 |
| 1999 | GAGCGTGGGTGCACGCATGG | 3991 |
| 2000 | AGCGTGGGTGCACGCATGGG | 3992 |
| 2001 | GCGTGGGTGCACGCATGGGC | 3993 |
| 2002 | CGTGGGTGCACGCATGGGCT | 3994 |
| 2003 | GTGGGTGCACGCATGGGCTG | 3995 |
| 2004 | TGGGTGCACGCATGGGCTGT | 3996 |
| 2005 | GGGTGCACGCATGGGCTGTG | 3997 |
| 2006 | GGTGCACGCATGGGCTGTGC | 3998 |
| 2007 | GTGCACGCATGGGCTGTGCC | 3999 |
| 2008 | TGCACGCATGGGCTGTGCCA | 4000 |
| 2009 | GCACGCATGGGCTGTGCCAG | 4001 |
| 2010 | CACGCATGGGCTGTGCCAGT | 4002 |
| 2011 | ACGCATGGGCTGTGCCAGTC | 4003 |
| 2012 | CGCATGGGCTGTGCCAGTCC | 4004 |
| 2013 | CCCTCGCGAGCGTGGGTGCA | 3984 |
| 2014 | CCCCTCGCGAGCGTGGGTGC | 3983 |
| 2015 | TCCCCTCGCGAGCGTGGGTG | 3982 |
| 2016 | GTCCCCTCGCGAGCGTGGGT | 3981 |
| 2017 | GGTCCCCTCGCGAGCGTGGG | 3980 |
| 2018 | AGGTCCCCTCGCGAGCGTGG | 3979 |
| 2019 | CAGGTCCCCTCGCGAGCGTG | 3978 |
| 2020 | GCAGGTCCCCTCGCGAGCGT | 3977 |
| 2021 | AGCAGGTCCCCTCGCGAGCG | 3976 |
| 2022 | CAGCAGGTCCCCTCGCGAGC | 3975 |
| 2023 | GCAGCAGGTCCCCTCGCGAG | 3974 |
| 2024 | GGCAGCAGGTCCCCTCGCGA | 3973 |
| 2025 | AGGCAGCAGGTCCCCTCGCG | 3972 |
| 2026 | AAGGCAGCAGGTCCCCTCGC | 3971 |
| 2027 | AAAGGCAGCAGGTCCCCTCG | 3970 |
| 2028 | CGATGTCTCCCTCGAGATCACA | 3717 |
| 2029 | GATGTCTCCCTCGAGATCAC | 3718 |
| 2030 | ATGTCTCCCTCGAGATCACA | 3719 |
| 2031 | TGTCTCCCTCGAGATCACAC | 3720 |
| 2032 | GTCTCCCTCGAGATCACACA | 3721 |
| 2033 | TCTCCCTCGAGATCACACAG | 3722 |
| 2034 | CTCCCTCGAGATCACACAGG | 3723 |
| 2035 | TCCCTCGAGATCACACAGGC | 3724 |
| 2036 | CCCTCGAGATCACACAGGCC | 3725 |
| 2037 | CCTCGAGATCACACAGGCCT | 3726 |
| 2038 | CTCGAGATCACACAGGCCTT | 3727 |
| 2039 | TCGAGATCACACAGGCCTTT | 3728 |
| 2040 | CGAGATCACACAGGCCTTTC | 3729 |
| 2041 | GCGATGTCTCCCTCGAGATC | 3716 |
| 2042 | GGCGATGTCTCCCTCGAGAT | 3715 |
| 2043 | AGGCGATGTCTCCCTCGAGA | 3714 |
| 2044 | GAGGCGATGTCTCCCTCGAG | 3713 |
| 2045 | AGAGGCGATGTCTCCCTCGA | 3712 |
| 2046 | GAGAGGCGATGTCTCCCTCG | 3711 |
| 2047 | GGAGAGGCGATGTCTCCCTC | 3710 |
| 2048 | TGGAGAGGCGATGTCTCCCT | 3709 |
| 2049 | TTGGAGAGGCGATGTCTCCC | 3708 |
| 2050 | CTTGGAGAGGCGATGTCTCC | 3707 |
| 2051 | GCTTGGAGAGGCGATGTCTC | 3706 |
| 2052 | GGCTTGGAGAGGCGATGTCT | 3705 |
| 2053 | AGGCTTGGAGAGGCGATGTC | 3704 |
| 2054 | GGACGGACGGATATCTGAGGCCAG | 2195 |
| 2055 | GACGGACGGATATCTGAGGC | 2196 |
| 2056 | ACGGACGGATATCTGAGGCC | 2197 |
| 2057 | CGGACGGATATCTGAGGCCA | 2198 |
| 2058 | GGACGGATATCTGAGGCCAG | 2199 |
| 2059 | GACGGATATCTGAGGCCAGG | 2200 |
| 2060 | ACGGATATCTGAGGCCAGGA | 2201 |
| 2061 | CGGATATCTGAGGCCAGGAG | 2202 |
| 2062 | CGTCCCCGCCACGTTGAAAGGC | 3954 |
| 2063 | GTCCCCGCCACGTTGAAAGG | 3955 |
| 2064 | TCCCCGCCACGTTGAAAGGC | 3956 |
| 2065 | CCCCGCCACGTTGAAAGGCA | 3957 |
| 2066 | CCCGCCACGTTGAAAGGCAG | 3958 |
| 2067 | CCGCCACGTTGAAAGGCAGC | 3959 |
| 2068 | CGCCACGTTGAAAGGCAGCA | 3960 |
| 2069 | GCCACGTTGAAAGGCAGCAG | 3961 |
| 2070 | CCACGTTGAAAGGCAGCAGG | 3962 |
| 2071 | CACGTTGAAAGGCAGCAGGT | 3963 |
| 2072 | ACGTTGAAAGGCAGCAGGTC | 3964 |
| 2073 | CGTTGAAAGGCAGCAGGTCC | 3965 |
| 2074 | ACGTCCCCGCCACGTTGAAA | 3953 |
| 2075 | CACGTCCCCGCCACGTTGAA | 3952 |
| 2076 | TCACGTCCCCGCCACGTTGA | 3951 |
| 2077 | GTCACGTCCCCGCCACGTTG | 3950 |
| 2078 | GGTCACGTCCCCGCCACGTT | 3949 |
| 2079 | AGGTCACGTCCCCGCCACGT | 3948 |
| 2080 | CAGGTCACGTCCCCGCCACG | 3947 |
| 2081 | ACAGGTCACGTCCCCGCCAC | 3946 |
| 2082 | AACAGGTCACGTCCCCGCCA | 3945 |
| 2083 | TAACAGGTCACGTCCCCGCC | 3944 |
| 2084 | TTAACAGGTCACGTCCCCGC | 3943 |
| 2085 | ATTAACAGGTCACGTCCCCG | 3942 |
| 2086 | CATTAACAGGTCACGTCCCC | 3941 |
| 2087 | TCATTAACAGGTCACGTCCC | 3940 |
| 2088 | TTCATTAACAGGTCACGTCC | 3939 |
| 2089 | TCTCGGACATGCTCAAATGGTGCAGGCG | 4080 |
| 2090 | CTCGGACATGCTCAAATGGT | 4081 |
| 2091 | TCGGACATGCTCAAATGGTG | 4082 |
| 2092 | CGGACATGCTCAAATGGTGC | 4083 |
| 2093 | CTCTCGGACATGCTCAAATG | 4079 |
| 2094 | GCTCTCGGACATGCTCAAAT | 4078 |
| 2095 | TGCTCTCGGACATGCTCAAA | 4077 |
| 2096 | ATGCTCTCGGACATGCTCAA | 4076 |
| 2097 | GATGCTCTCGGACATGCTCA | 4075 |
| 2098 | GGATGCTCTCGGACATGCTC | 4074 |
| 2099 | TGGATGCTCTCGGACATGCT | 4073 |
| 2100 | GTGGATGCTCTCGGACATGC | 4072 |
| 2101 | GGTGGATGCTCTCGGACATG | 4071 |
| 2102 | TGGTGGATGCTCTCGGACAT | 4070 |
| 2103 | CTGGTGGATGCTCTCGGACA | 4069 |
| 2104 | TCTGGTGGATGCTCTCGGAC | 4068 |
| 2105 | CTCTGGTGGATGCTCTCGGA | 4067 |
| 2106 | ACTCTGGTGGATGCTCTCGG | 4066 |
| 2107 | CACTCTGGTGGATGCTCTCG | 4065 |
| 2108 | CACCGACAGGAGCCAATAGTGCAACG | 4876 |
| 2109 | ACCGACAGGAGCCAATAGTG | 4877 |
| 2110 | CCGACAGGAGCCAATAGTGC | 4878 |
| 2111 | CGACAGGAGCCAATAGTGCA | 4879 |
| 2112 | TCACCGACAGGAGCCAATAG | 4875 |
| 2113 | CTCACCGACAGGAGCCAATA | 4874 |
| 2114 | ACTCACCGACAGGAGCCAAT | 4873 |
| 2115 | CACTCACCGACAGGAGCCAA | 4872 |
| 2116 | GCACTCACCGACAGGAGCCA | 4871 |
| 2117 | TGCACTCACCGACAGGAGCC | 4870 |
| 2118 | CTGCACTCACCGACAGGAGC | 4869 |
| 2119 | ACTGCACTCACCGACAGGAG | 4868 |
| 2120 | CACTGCACTCACCGACAGGA | 4867 |
| 2121 | GCACTGCACTCACCGACAGG | 4866 |
| 2122 | GGCACTGCACTCACCGACAG | 4865 |
| 2123 | AGGCACTGCACTCACCGACA | 4864 |
| 2124 | CAGGCACTGCACTCACCGAC | 4863 |
| 2125 | TCAGGCACTGCACTCACCGA | 4862 |
| 2126 | GTCAGGCACTGCACTCACCG | 4861 |
| 2127 | GTCCGGCAGAGGGACCCATGCTGACG | 4940 |
| 2128 | TCCGGCAGAGGGACCCATGC | 4941 |
| 2129 | CCGGCAGAGGGACCCATGCT | 4942 |
| 2130 | CGGCAGAGGGACCCATGCTG | 4943 |
| 2131 | GGTCCGGCAGAGGGACCCAT | 4939 |
| 2132 | TGGTCCGGCAGAGGGACCCA | 4938 |
| 2133 | GTGGTCCGGCAGAGGGACCC | 4937 |
| 2134 | TGTGGTCCGGCAGAGGGACC | 4936 |
| 2135 | GTGTGGTCCGGCAGAGGGAC | 4935 |
| 2136 | CGTGAGGCACATGTCCGTGTG | 3511 |
| 2137 | GTGAGGCACATGTCCGTGTG | 3512 |
| 2138 | TGAGGCACATGTCCGTGTGA | 3513 |
| 2139 | GAGGCACATGTCCGTGTGAC | 3514 |
| 2140 | AGGCACATGTCCGTGTGACC | 3515 |
| 2141 | GGCACATGTCCGTGTGACCT | 3516 |
| 2142 | GCACATGTCCGTGTGACCTG | 3517 |
| 2143 | CACATGTCCGTGTGACCTGC | 3518 |
| 2144 | ACATGTCCGTGTGACCTGCC | 3519 |
| 2145 | CATGTCCGTGTGACCTGCCT | 3520 |
| 2146 | ATGTCCGTGTGACCTGCCTG | 3521 |
| 2147 | TGTCCGTGTGACCTGCCTGT | 3522 |
| 2148 | GTCCGTGTGACCTGCCTGTC | 3523 |
| 2149 | TCCGTGTGACCTGCCTGTCC | 3524 |
| 2150 | CCGTGTGACCTGCCTGTCCC | 3525 |
| 2151 | CGTGTGACCTGCCTGTCCCT | 3526 |
| 2152 | ACGTGAGGCACATGTCCGTG | 3510 |
| 2153 | TACGTGAGGCACATGTCCGT | 3509 |
| 2154 | ATACGTGAGGCACATGTCCG | 3508 |
| 2155 | CATACGTGAGGCACATGTCC | 3507 |
| 2156 | GCATACGTGAGGCACATGTC | 3506 |
| 2157 | AGCATACGTGAGGCACATGT | 3505 |
| 2158 | AAGCATACGTGAGGCACATG | 3504 |
| 2159 | GAAGCATACGTGAGGCACAT | 3503 |
| 2160 | TGAAGCATACGTGAGGCACA | 3502 |
| 2161 | TTGAAGCATACGTGAGGCAC | 3501 |
| 2162 | CTTGAAGCATACGTGAGGCA | 3500 |
| 2163 | CCTTGAAGCATACGTGAGGC | 3499 |
| 2164 | CCCTTGAAGCATACGTGAGG | 3498 |
| 2165 | CCCCTTGAAGCATACGTGAG | 3497 |
| 2166 | GCCCCTTGAAGCATACGTGA | 3496 |
| 2167 | GGCCCCTTGAAGCATACGTG | 3495 |
| 2168 | GGGCCCCTTGAAGCATACGT | 3494 |
| 2169 | AGGGCCCCTTGAAGCATACG | 3493 |
| 2170 | CAGATGCAGCAAGCGGGCGGGAGAG | 798 |
| 2171 | CCAGATGCAGCAAGCGGGCG | 797 |
| 2172 | TCCAGATGCAGCAAGCGGGC | 796 |
| 2173 | GTCCAGATGCAGCAAGCGGG | 795 |
| 2174 | TGTCCAGATGCAGCAAGCGG | 794 |
| 2175 | GTGTCCAGATGCAGCAAGCG | 793 |
| 2176 | CCACGCTGCTGTCCCGCCAGCCCTGCAG | 848 |
| 2177 | CACGCTGCTGTCCCGCCAGC | 849 |
| 2178 | ACGCTGCTGTCCCGCCAGCC | 850 |
| 2179 | CGCTGCTGTCCCGCCAGCCC | 851 |
| 2180 | GCTGCTGTCCCGCCAGCCCT | 852 |
| 2181 | CTGCTGTCCCGCCAGCCCTG | 853 |
| 2182 | TGCTGTCCCGCCAGCCCTGC | 854 |
| 2183 | GCTGTCCCGCCAGCCCTGCA | 855 |
| 2184 | CTGTCCCGCCAGCCCTGCAG | 856 |
| 2185 | TGTCCCGCCAGCCCTGCAGC | 857 |
| 2186 | GTCCCGCCAGCCCTGCAGCC | 858 |
| 2187 | TCCCGCCAGCCCTGCAGCCC | 859 |
| 2188 | CCCGCCAGCCCTGCAGCCCA | 860 |
| 2189 | CCGCCAGCCCTGCAGCCCAG | 861 |
| 2190 | CGCCAGCCCTGCAGCCCAGA | 862 |
| 2191 | TCCACGCTGCTGTCCCGCCA | 847 |
| 2192 | GTCCACGCTGCTGTCCCGCC | 846 |
| 2193 | AGTCCACGCTGCTGTCCCGC | 845 |
| 2194 | GAGTCCACGCTGCTGTCCCG | 844 |
| 2195 | TGAGTCCACGCTGCTGTCCC | 843 |
| 2196 | CTGAGTCCACGCTGCTGTCC | 842 |
| 2197 | ACTGAGTCCACGCTGCTGTC | 841 |
| 2198 | GACTGAGTCCACGCTGCTGT | 840 |
| 2199 | AGACTGAGTCCACGCTGCTG | 839 |
| 2200 | GAGACTGAGTCCACGCTGCT | 838 |
| 2201 | GGAGACTGAGTCCACGCTGC | 837 |
| 2202 | AGGAGACTGAGTCCACGCTG | 836 |
| 2203 | TAGGAGACTGAGTCCACGCT | 835 |
| 2204 | CTAGGAGACTGAGTCCACGC | 834 |
| 2205 | CCTAGGAGACTGAGTCCACG | 833 |
| 2206 | ACCCGCCCCCACCCTGTGTGCCCCCCG | 1276 |
| 2207 | CCCGCCCCCACCCTGTGTGC | 1277 |
| 2208 | CCGCCCCCACCCTGTGTGCC | 1278 |
| 2209 | CGCCCCCACCCTGTGTGCCC | 1279 |
| 2210 | CACCCGCCCCCACCCTGTGT | 1275 |
| 2211 | CCACCCGCCCCCACCCTGTG | 1274 |
| 2212 | CCCACCCGCCCCCACCCTGT | 1273 |
| 2213 | CCCCACCCGCCCCCACCCTG | 1272 |
| 2214 | CCCCCACCCGCCCCCACCCT | 1271 |
| 2215 | CCCCCCACCCGCCCCCACCC | 1270 |
| 2216 | GCCCCCCACCCGCCCCCACC | 1269 |
| 2217 | AGCCCCCCACCCGCCCCCAC | 1268 |
| 2218 | CAGCCCCCCACCCGCCCCCA | 1267 |
| 2219 | GCAGCCCCCCACCCGCCCCC | 1266 |
| 2220 | AGCAGCCCCCCACCCGCCCC | 1265 |
| 2221 | CAGCAGCCCCCCACCCGCCC | 1264 |
| 2222 | CCAGCAGCCCCCCACCCGCC | 1263 |
| 2223 | CCCAGCAGCCCCCCACCCGC | 1262 |
| 2224 | ACCCAGCAGCCCCCCACCCG | 1261 |
| 2225 | CGCTCAGAGCCCGAGGCCTTTG | 1352 |
| 2226 | GCTCAGAGCCCGAGGCCTTT | 1353 |
| 2227 | CTCAGAGCCCGAGGCCTTTG | 1354 |
| 2228 | TCAGAGCCCGAGGCCTTTGC | 1355 |
| 2229 | CAGAGCCCGAGGCCTTTGCC | 1356 |
| 2230 | AGAGCCCGAGGCCTTTGCCC | 1357 |
| 2231 | GAGCCCGAGGCCTTTGCCCC | 1358 |
| 2232 | AGCCCGAGGCCTTTGCCCCT | 1359 |
| 2233 | GCCCGAGGCCTTTGCCCCTC | 1360 |
| 2234 | CCCGAGGCCTTTGCCCCTCC | 1361 |
| 2235 | CCGAGGCCTTTGCCCCTCCC | 1362 |
| 2236 | CGAGGCCTTTGCCCCTCCCT | 1363 |
| 2237 | CCGCTCAGAGCCCGAGGCCT | 1351 |
| 2238 | GCCGCTCAGAGCCCGAGGCC | 1350 |
| 2239 | GGCCGCTCAGAGCCCGAGGC | 1349 |
| 2240 | AGGCCGCTCAGAGCCCGAGG | 1348 |
| 2241 | AAGGCCGCTCAGAGCCCGAG | 1347 |
| 2242 | CAAGGCCGCTCAGAGCCCGA | 1346 |
| 2243 | CCAAGGCCGCTCAGAGCCCG | 1345 |
| 2244 | GCCAAGGCCGCTCAGAGCCC | 1344 |
| 2245 | GGCCAAGGCCGCTCAGAGCC | 1343 |
| 2246 | GGGCCAAGGCCGCTCAGAGC | 1342 |
| 2247 | AGGGCCAAGGCCGCTCAGAG | 1341 |
| 2248 | AAGGGCCAAGGCCGCTCAGA | 1340 |
| 2249 | GAAGGGCCAAGGCCGCTCAG | 1339 |
| 2250 | AGAAGGGCCAAGGCCGCTCA | 1338 |
| 2251 | GAGAAGGGCCAAGGCCGCTC | 1337 |

Hot Zones (Relative upstream location to gene start site)
700-900
1100-1400
1550-1700
2100-2300
3450-4300
4700-5000

### Examples

Genetic Code (5′ Upstream Region)

(SEQ ID NO: 11957)

GAGACATAACCATTGTACCTGCCTCCTAGGCTGTGAGGATTCACTGAGAT
GATCTTATAGTGCTTGCAACAATGTCTGGCACATAGGAAAAGTGATCACT
AAATGTTAGCCACGTCTTACTCCTGCAAGGCTCACCTCCCTGGAACCCAT
CGGTCCCAACCCTGCTCCTGAATCAGGCACAGTCCAGCTTGCAGCGGGAG
CAAAGGTCAGTACTCAGTGCCCCTGTCCCTTCCCCAGGCCAGAGGGGAGG
AGGAGACTGAGTCACGAATGACACCTCAGCCGCAGTTTGACCTCCAGGAC
TTACAGTCCTAGCAGCCGGTGCCACTAGCATGTGAGAGGTCCAGAGGCGC
TTCTGTCTCACCCGCCCGCCTGGGTGCACCCATGCTGGGAGCGCCTGCAC
CATTTGAGCATGTCCGAGAGCATCCACCAGAGTGTGTGTGGATTCACAGA
AGTGTGCAAATCACTAAGAACCAAGGGACTGGCACAGCCCATGCGTGCAC
CCACGCTCGCGAGGGGACCTGCTGCCTTTCAACGTGGCGGGGACGTGACC
TGTTAATGAATGTATTTACTTCCCAAAGTCTGAGGGTACGTTTTGCATCA
ATCTGTAGATGGATTTGTTTTGGGGAGCAGGGAGAGAATGAGAGCCCCCT
GTGCTCAGTCTTAGAGGGTGCAAGTAGCTGATGGGAAGAGCAGACTGCCT
TCCAGCCAGGCCTGGTCCTGTGAGTCAGGGACGTCCATCTTAGTGGGCAT
GAAAGGCCTGTGTGATCTCGAGGGAGACATCGCCTCTCCAAGCCTCTCCT
TATCTGTGCAACAGGCAGACTTAATGATTGGTGAGGCAATGAGGCTGATA
GCTCAGCATTAGCTACAGCCACCCCTCCTGGCCAACCACACAGGGATCAA
ACCAGGGGTCAGTCCAGAGGTCAGAGTCAGGAGCAGACAACTCAGATCCA
GCCAGGGACAGGCAGGTCACACGGACATGTGCCTCACGTATGCTTCAAGG
GGCCCTCCCCCGGGCAGAACTGAAGGACAGCTCCTGTTGCCATAGGAGGG
AGCTGGGTGAGATACTAGGAGGAACTTCCGGCATGATGATGTGTGATGAA
CAAGGGCCTCTGGCCAACAGGTCTGAATCAGGGCTGCCCAGCCCAGCCTG
GTGGGAAGGGCATGGAGCATGGGGGCTCATGTACTAAACCTCACCTGGAC
ACAAGGTGAAACAGCCCAACCCCAGAGGACCATTTTTGGCCCCGGATGGT
CAAATCCCCTCTTCCTCCCATCTACCACTGGCTTCTCCCTGGAGCAGTCT
TCATCCCAGGGGAGCCATGATGGGAGAGAGGGGCAGCGCAGGCTGGCCAC
CAAGAGATCCCCTGCCGGGGTGCAGGTTGGACTGTTGGTGAGGGGCCACA
GGTATTCTCAGGTACCAAGCCCTTGGAAGGAGACAAGGTACCAGGCTTCC
TGGAGGTGTGCTACATCTAGCTCAGCACCCTGCCAGGTCTCTCTACCCAC
ATGTCCTGACCTCCCTGGGTCCGTTGCCATGCGGGAGAGAGAGGCCAGGC
TCCTCCAGACCCTCTGCAGAGATGGAAAGGCTTGGAGGGTCTGGGGCCAC
GGGACCCCGCCAGCCCATTCTAGCACACCCGGGCCCATAGACCTTGTTGC
CTGCCCCTGCCTGGATCTGGGTCCCCACTGTGCCTTTGCCTCTGGGGCTA
TGGAGCAGGCCGCAGCAGAAGAGGAAAGGGCATCCCCAATACCAAATCCT
CCAGTGACCACTTCTTCACCTTCTACCCCACCACCAAAGTCTGCAGGAGA
CTTGAGACAGGTTTGTTCTGGGCGTGTGACTGATGCCTCTATAGGGGTCT
CAGTGCTCTAAGCCGTCTGGTATTTGCCTGGGGTGTGTGAAGACCTGGAT
TAAGGTTCCCAGCCTTACTACTAATGGGCTGTGCACTTGGAGCCCTTAGA
GCCTTAGGTTTCTAACCTATAAAATGGACTTAACGTCTACTTCACAGGGT
TCTATTTGCATTTTAACAGAAAACAAAGTCTTAAGTCAAAGGAATGAATC
TCTCTCTCTCTCTCTCTCTCTCTTTTTTAGACCAAGTCTAGCTCTGTCAC
TGGAGTGCAATGGTGCGATCTCTGCTCACTGCAACCTCCACCTCCGGGGT
TCAAGCAATTCTCGTGCCTCAGCCTCCTGAGTAGCTGGGACTACAGGCGT
GCATCACCATGCTCGGCTAATTTTTTGTATTTTTAGTAGAGACTGGGTTT
CGCCATGTTGCCCAGGCTGGTCTCGAACTCCTGGCCTCAGATATCCGTCC
GTCCCAGCCTCCCAAAGTGCTGGGATTACAGGCATGAGCCACTGTGCCCA
GCCAGGAATGGATCGCTAATAGAGGAATTCCAAGTCTCACCCACCGATAA
AGAATTCTGAGGGCAGAGCCGGGCCACTTTCTCAGGCCTCTGATTTCATA
CTGTGGTGTTAGTTACTTCTGAGAGGACAGCTTGCTGCCAGAGCTCTATT
TTTTATGTTAGAGGCTCCTTCTGCCTGCAGACTCTGCTGTCTGGGAAGGG
CACAGCGTTAGGAGGGAGAGGGAGGTGTGAGTCCCTCCATGGACCCGCTG
CTTTGTACTTCTCTATCTCATTTCCTTTTCAGCACCACTCTGGGCAATCA
GTATTCCAGCCCCATTTTATCCTCAGAAAATTGAGGCTCTGAGATGTTAT
CTCTGTGACCTGGGTCCTATTACGTGCCAAAGGCATCATTTAAGCCTAAG
ATGTCCTGGCTCCAAGGTGTCAGCATCTGGAAGACAGGCGCCCTCATCCT
GCCATCCCTGCTGCGGCTTCACTGTGGGCCCAGGGGACATCTCAGCCCCG
AGAAGGGTCAGCGGCCCCTCCTGGACCACCGACTCCCCGCAGAACTCCTC
TGTGCCCTCTCCTCACCAGACCTTGTTCCTCCCAGTTGCTCCCACAGCCA
GGGGGCAGTGAGGGCTGCTCTTCCCCCAGCCCCACTGAGGAACCCAGGAA
GGTGAACGAGAGAATCAGTCCTGGTGGGGGCTGGGGAGGGCCCCAGACAT
GAGACCAGCTCCTCCCCCAGGGGATGTTATCAGTGGGTCCAGAGGGCAAA
ATAGGGAGCCTGGTGGAGGGAGGGGCAAAGGCCTCGGGCTCTGAGCGGCC
TTGGCCCTTCTCCACCAACCCCTGCCCTACACTAAGGGGGAGGCAGCGGG
GGGCACACAGGGTGGGGGCGGGTGGGGGGCTGCTGGGTGAGCAGCACTCG
CCTGCCTGGATTGAAACCCAGAGATGGAGGTGCTGGGAGGGGCTGTGAGA
GCTCAGCCCTGTAACCAGGCCTTGCCGGAGCCACTGATGCCTGGTCTTCT
GTGCCTTTACTCCAAACACCCCCCAGCCCAAGCCACCCACTTGTTCTCAA
GTCTGAAGAAGCCCCTCACCCCTCTACTCCAGGCTGTGTTCAGGGCTTGG
GGCTGGTGGAGGGAGGGGCCTGAAATTCCAGTGTGAAAGGCTGAGATGGG
CCCGAGGCCCCTGGCCTATGTCCAAGCCATTTCCCCTCTCACCAGCCTCT
CCCTGGGGAGCCAGTCAGCTAGGAAGGAATGAGGGCTCCCCAGGCCCACC
CCCAGTTCCTGAGCTCATCTGGGCTGCAGGGCTGGCGGGACAGCAGCGTG
GACTCAGTCTCCTAGGGATTTCCCAACTCTCCCGCCCGCTTGCTGCATCT
GGACACCCTGCCTCAGGCCCTCATCTCCACTGGTCAGCAGGTGACCTTTG
CCCAGCGCCCTGGGTCCTCAGTGCCTGCTGCCCTGGAGATGATATAAAAC
AGGTCAGAACCCTCCTGCCTGTCTGCTCAGTTCATCCCTAGAGGCAGCTG
CTCCAGGTAATGCCCTCTGGGGAGGGGAAAGAGGAGGGGAGGAGGATGAA
GAGGGGCAAGAGGAGCTCCCTGCCCAGCCCAGCCAGCAAGCCTGGAGAAG
CACTTGCTAGAGCTAAGGAAGCCTCGGAGCTGGACGGGTGCCCCCCACCC
CTCATCATAACCTGAAGAACATGGAGGCCCGGGAGGGGTGTCACTTGCCC
AAAGCTACACAGGGGGTGGGGCTGGAAGTGGCTCCAAGTGCAGGTTCCCC
CCTCATTCTTCAGGCTTAGGGCTGGAGGAAGCCTTAGACAGCCCAGTCCT
ACCCCAGACAGGGAAACTGAGGCCTGGAGAGGGCCAGAAATCACCCAAAG
ACACACAGCATGTTGGCTGGACTGGACGGAGATCAGTCCAGACCGCAGGT
GCCTTGATGTTCAGTCTGGTGGGTTTTCTGCTCCATCCCACCCACCTCCC
TTTGGGCCTCGATCCCTCGCCCCTCACCAGTCCCCCTTCTGAGAGCCCGT
ATTAGCAGGGAGCCGGCCCCTACTCCTTCTGGCAGACCCAGCTAAGGTTC
TACCTTAGGGGCCACGCCACCTCCCCAGGGAGGGGTCCAGAGGCATGGGG
ACCTGGGGTGCCCCTCACAGGACACTTCCTTGCAGGAACAGAGGTGCCAT
G

[0333] 9) APO B. Apolipoprotein B (ApoB) are the primary apolipoproteins of chylomicrons and low-density lipoproteins (LDL) and is required for lipoprotein formation during the transport of cholesterol to tissues. ApoB on the LDL particle acts as a ligand for LDL receptors in various cells throughout the body. High levels of ApoB can lead to plaques that cause vascular disease (atherosclerosis), leading to heart disease. There is considerable evidence that levels of ApoB are a better indicator of heart disease risk than total cholesterol or LDL (Contois et al, 2011; J. Clin. Lipid. 5 (4): 264-272).

[0334] There are two forms of ApoB (ApoB48 and ApoB100), with tissue regulated editing of ApoB48 and ApoB100 (reviewed in Davidson 2000; Ann. Rev. Nutr.; 20: 169-193). Editing is restricted to those transcripts expressed in the small intestine. This shorter version of the protein has a function specific to the small intestine. Editing results in a codon change creating an in frame stop codon leading to translation of a truncated protein, ApoB48. This stop codon results in the translation of a protein which lacks the carboxyl terminus which contains the protein's LDLR binding domain. The full protein ApoB100 which has nearly 4500 amino acid is present in VLDL and LDL. The main function of the full length liver expressed ApoB100 is as ligand for activation of the LDL-R. However editing results in a protein lacking this LDL-R binding region of the protein. This alters the function of the protein and the shorter ApoB48 protein as specific functions relative to the small intestine. ApoB48 is identical to the amino terminal 48% of ApoB100 (Knott et al., 1986; Nature 323 (6090): 734-8). The function of this isoform is in fat absorption of the small intestine and is involved in the synthesis, assembly and secretion of chylomicrons. These chylomicrons transport dietary lipids to tissues while the remaining chylomicrons along with associated residual lipids are in 2-3 hours taken up by the liver via the interaction of apolipoprotein E (ApoE) with lipoprotein receptors. It is the dominant ApoB protein in the small intestine of most mammals and the key protein in the exogenous pathway of lipoprotein metabolism.

[0335] Protein: ApoB Gene: APOB (Homo sapiens, chromosome 2, 21224301-21266945 [NCBI Reference Sequence: NC_{—}000002.11]; start site location: 21266817; strand: negative)

Gene Identification

| | |
|---|---|
| GeneID | 338 |
| HGNC | 603 |
| HPRD | 00133 |
| MIM | 107730 |

Targeted Sequences

| | | Relative |
|---|---|---|
| | | upstream |
| | | location |
| Sequence | | to gene |
| ID No: | Sequence (5′-3′) | start site |
| 2252 | CGGTGGGGCGGCTCCTGGGCTGC | 10 |
| 2329 | CCTCGCGGCCCTGGCTGGCTGGGCG | 46 |
| 2406 | AACCGAGAAGGGCACTCAGCCCCG | 88 |
| 2440 | CGGCGCCCGCACCCCATTTATAGG | 136 |
| 2451 | GTCCAAAGGGCGCCTCCCGGGCC | 195 |
| 2475 | CGTCTTCAGTGCTCTGGCGCGGCC | 341 |
| 2513 | CACCGGAAGCTTCAGCCAGCGCTCGCTG | 988 |
| 2552 | CGAGTGGGAGGCGGCCAGGAGCAAGCCG | 1281 |
| 2553 | CGTACACTCACGGAAATGCTGTAAAG | 2533 |
| 2576 | CGTCACAGCCAATAATGAGCGTACGC | 4862 |

Targeted Shift Sequences

| | | Relative |
|---|---|---|
| | | upstream |
| | | location |
| Sequence | | to gene |
| ID No: | Sequence (5′-3′) | start site |
| 2252 | CGGTGGGGCGGCTCCTGGGCTGC | 10 |
| 2253 | GGTGGGGCGGCTCCTGGGCT | 11 |
| 2254 | GTGGGGCGGCTCCTGGGCTG | 12 |
| 2255 | TGGGGCGGCTCCTGGGCTGC | 13 |
| 2256 | GGGGCGGCTCCTGGGCTGCG | 14 |
| 2257 | GGGCGGCTCCTGGGCTGCGG | 15 |
| 2258 | GGCGGCTCCTGGGCTGCGGC | 16 |
| 2259 | GCGGCTCCTGGGCTGCGGCC | 17 |
| 2260 | CGGCTCCTGGGCTGCGGCCT | 18 |
| 2261 | GGCTCCTGGGCTGCGGCCTG | 19 |
| 2262 | GCTCCTGGGCTGCGGCCTGG | 20 |
| 2263 | CTCCTGGGCTGCGGCCTGGC | 21 |
| 2264 | TCCTGGGCTGCGGCCTGGCC | 22 |
| 2265 | CCTGGGCTGCGGCCTGGCCT | 23 |
| 2266 | CTGGGCTGCGGCCTGGCCTC | 24 |
| 2267 | TGGGCTGCGGCCTGGCCTCG | 25 |
| 2268 | GGGCTGCGGCCTGGCCTCGG | 26 |
| 2269 | GGCTGCGGCCTGGCCTCGGC | 27 |
| 2270 | GCTGCGGCCTGGCCTCGGCC | 28 |
| 2271 | CTGCGGCCTGGCCTCGGCCT | 29 |
| 2272 | TGCGGCCTGGCCTCGGCCTC | 30 |
| 2273 | GCGGCCTGGCCTCGGCCTCG | 31 |
| 2274 | CGGCCTGGCCTCGGCCTCGC | 32 |
| 2275 | GGCCTGGCCTCGGCCTCGCG | 33 |
| 2276 | GCCTGGCCTCGGCCTCGCGG | 34 |
| 2277 | CCTGGCCTCGGCCTCGCGGC | 35 |
| 2278 | CTGGCCTCGGCCTCGCGGCC | 36 |
| 2279 | TGGCCTCGGCCTCGCGGCCC | 37 |
| 2280 | GGCCTCGGCCTCGCGGCCCT | 38 |
| 2281 | GCCTCGGCCTCGCGGCCCTG | 39 |
| 2282 | CCTCGGCCTCGCGGCCCTGG | 40 |
| 2283 | CTCGGCCTCGCGGCCCTGGC | 41 |
| 2284 | TCGGCCTCGCGGCCCTGGCT | 42 |
| 2285 | CGGCCTCGCGGCCCTGGCTG | 43 |
| 2286 | GGCCTCGCGGCCCTGGCTGG | 44 |
| 2287 | GCCTCGCGGCCCTGGCTGGC | 45 |
| 2288 | CCTCGCGGCCCTGGCTGGCT | 46 |
| 2289 | CTCGCGGCCCTGGCTGGCTG | 47 |
| 2290 | TCGCGGCCCTGGCTGGCTGG | 48 |
| 2291 | CGCGGCCCTGGCTGGCTGGG | 49 |
| 2292 | GCGGCCCTGGCTGGCTGGGC | 50 |
| 2293 | CGGCCCTGGCTGGCTGGGCG | 51 |
| 2294 | GGCCCTGGCTGGCTGGGCGG | 52 |
| 2295 | GCCCTGGCTGGCTGGGCGGG | 53 |
| 2296 | CCCTGGCTGGCTGGGCGGGC | 54 |
| 2297 | CCTGGCTGGCTGGGCGGGCT | 55 |
| 2298 | CTGGCTGGCTGGGCGGGCTC | 56 |
| 2299 | TGGCTGGCTGGGCGGGCTCC | 57 |
| 2300 | GGCTGGCTGGGCGGGCTCCT | 58 |
| 2301 | GCTGGCTGGGCGGGCTCCTC | 59 |
| 2302 | CTGGCTGGGCGGGCTCCTCA | 60 |
| 2303 | TGGCTGGGCGGGCTCCTCAG | 61 |
| 2304 | GGCTGGGCGGGCTCCTCAGC | 62 |
| 2305 | GCTGGGCGGGCTCCTCAGCG | 63 |
| 2306 | CTGGGCGGGCTCCTCAGCGG | 64 |
| 2307 | TGGGCGGGCTCCTCAGCGGC | 65 |
| 2308 | GGGCGGGCTCCTCAGCGGCA | 66 |
| 2309 | GGCGGGCTCCTCAGCGGCAG | 67 |
| 2310 | GCGGGCTCCTCAGCGGCAGC | 68 |
| 2311 | CGGGCTCCTCAGCGGCAGCA | 69 |
| 2312 | GGGCTCCTCAGCGGCAGCAA | 70 |
| 2313 | GGCTCCTCAGCGGCAGCAAC | 71 |
| 2314 | GCTCCTCAGCGGCAGCAACC | 72 |
| 2315 | CTCCTCAGCGGCAGCAACCG | 73 |
| 2316 | TCCTCAGCGGCAGCAACCGA | 74 |
| 2317 | CCTCAGCGGCAGCAACCGAG | 75 |
| 2318 | CTCAGCGGCAGCAACCGAGA | 76 |
| 2319 | TCAGCGGCAGCAACCGAGAA | 77 |
| 2320 | GCGGTGGGGCGGCTCCTGGG | 9 |
| 2321 | TGCGGTGGGGCGGCTCCTGG | 8 |
| 2322 | CTGCGGTGGGGCGGCTCCTG | 7 |
| 2323 | GCTGCGGTGGGGCGGCTCCT | 6 |
| 2324 | AGCTGCGGTGGGGCGGCTCC | 5 |
| 2325 | CAGCTGCGGTGGGGCGGCTC | 4 |
| 2326 | CCAGCTGCGGTGGGGCGGCT | 3 |
| 2327 | GCCAGCTGCGGTGGGGCGGC | 2 |
| 2328 | CGCCAGCTGCGGTGGGGCGG | 1 |
| 2329 | CCTCGCGGCCCTGGCTGGCTGGGCG | 46 |
| 2330 | CTCGCGGCCCTGGCTGGCTG | 47 |
| 2331 | TCGCGGCCCTGGCTGGCTGG | 48 |
| 2332 | CGCGGCCCTGGCTGGCTGGG | 49 |
| 2333 | GCGGCCCTGGCTGGCTGGGC | 50 |
| 2334 | CGGCCCTGGCTGGCTGGGCG | 51 |
| 2335 | GGCCCTGGCTGGCTGGGCGG | 52 |
| 2336 | GCCCTGGCTGGCTGGGCGGG | 53 |
| 2337 | CCCTGGCTGGCTGGGCGGGC | 54 |
| 2338 | CCTGGCTGGCTGGGCGGGCT | 55 |
| 2339 | CTGGCTGGCTGGGCGGGCTC | 56 |
| 2340 | TGGCTGGCTGGGCGGGCTCC | 57 |
| 2341 | GGCTGGCTGGGCGGGCTCCT | 58 |
| 2342 | GCTGGCTGGGCGGGCTCCTC | 59 |
| 2343 | CTGGCTGGGCGGGCTCCTCA | 60 |
| 2344 | TGGCTGGGCGGGCTCCTCAG | 61 |
| 2345 | GGCTGGGCGGGCTCCTCAGC | 62 |
| 2346 | GCTGGGCGGGCTCCTCAGCG | 63 |
| 2347 | CTGGGCGGGCTCCTCAGCGG | 64 |
| 2348 | TGGGCGGGCTCCTCAGCGGC | 65 |
| 2349 | GGGCGGGCTCCTCAGCGGCA | 66 |
| 2350 | GGCGGGCTCCTCAGCGGCAG | 67 |
| 2351 | GCGGGCTCCTCAGCGGCAGC | 68 |
| 2352 | CGGGCTCCTCAGCGGCAGCA | 69 |
| 2353 | GGGCTCCTCAGCGGCAGCAA | 70 |
| 2354 | GGCTCCTCAGCGGCAGCAAC | 71 |
| 2355 | GCTCCTCAGCGGCAGCAACC | 72 |
| 2356 | CTCCTCAGCGGCAGCAACCG | 73 |
| 2357 | TCCTCAGCGGCAGCAACCGA | 74 |
| 2358 | CCTCAGCGGCAGCAACCGAG | 75 |
| 2359 | CTCAGCGGCAGCAACCGAGA | 76 |
| 2360 | TCAGCGGCAGCAACCGAGAA | 77 |
| 2361 | GCCTCGCGGCCCTGGCTGGC | 45 |
| 2362 | GGCCTCGCGGCCCTGGCTGG | 44 |
| 2363 | CGGCCTCGCGGCCCTGGCTG | 43 |
| 2364 | TCGGCCTCGCGGCCCTGGCT | 42 |
| 2365 | CTCGGCCTCGCGGCCCTGGC | 41 |
| 2366 | CCTCGGCCTCGCGGCCCTGG | 40 |
| 2367 | GCCTCGGCCTCGCGGCCCTG | 39 |
| 2368 | GGCCTCGGCCTCGCGGCCCT | 38 |
| 2369 | TGGCCTCGGCCTCGCGGCCC | 37 |
| 2370 | CTGGCCTCGGCCTCGCGGCC | 36 |
| 2371 | CCTGGCCTCGGCCTCGCGGC | 35 |
| 2372 | GCCTGGCCTCGGCCTCGCGG | 34 |
| 2373 | GGCCTGGCCTCGGCCTCGCG | 33 |
| 2374 | CGGCCTGGCCTCGGCCTCGC | 32 |
| 2375 | GCGGCCTGGCCTCGGCCTCG | 31 |
| 2376 | TGCGGCCTGGCCTCGGCCTC | 30 |
| 2377 | CTGCGGCCTGGCCTCGGCCT | 29 |
| 2378 | GCTGCGGCCTGGCCTCGGCC | 28 |
| 2379 | GGCTGCGGCCTGGCCTCGGC | 27 |
| 2380 | GGGCTGCGGCCTGGCCTCGG | 26 |
| 2381 | TGGGCTGCGGCCTGGCCTCG | 25 |
| 2382 | CTGGGCTGCGGCCTGGCCTC | 24 |
| 2383 | CCTGGGCTGCGGCCTGGCCT | 23 |
| 2384 | TCCTGGGCTGCGGCCTGGCC | 22 |
| 2385 | CTCCTGGGCTGCGGCCTGGC | 21 |
| 2386 | GCTCCTGGGCTGCGGCCTGG | 20 |
| 2387 | GGCTCCTGGGCTGCGGCCTG | 19 |
| 2388 | CGGCTCCTGGGCTGCGGCCT | 18 |
| 2389 | GCGGCTCCTGGGCTGCGGCC | 17 |
| 2390 | GGCGGCTCCTGGGCTGCGGC | 16 |
| 2391 | GGGCGGCTCCTGGGCTGCGG | 15 |
| 2392 | GGGGCGGCTCCTGGGCTGCG | 14 |
| 2393 | TGGGGCGGCTCCTGGGCTGC | 13 |
| 2394 | GTGGGGCGGCTCCTGGGCTG | 12 |
| 2395 | GGTGGGGCGGCTCCTGGGCT | 11 |
| 2396 | CGGTGGGGCGGCTCCTGGGC | 10 |
| 2397 | GCGGTGGGGCGGCTCCTGGG | 9 |
| 2398 | TGCGGTGGGGCGGCTCCTGG | 8 |
| 2399 | CTGCGGTGGGGCGGCTCCTG | 7 |
| 2400 | GCTGCGGTGGGGCGGCTCCT | 6 |
| 2401 | AGCTGCGGTGGGGCGGCTCC | 5 |
| 2402 | CAGCTGCGGTGGGGCGGCTC | 4 |
| 2403 | CCAGCTGCGGTGGGGCGGCT | 3 |
| 2404 | GCCAGCTGCGGTGGGGCGGC | 2 |
| 2405 | CGCCAGCTGCGGTGGGGCGG | 1 |
| 2406 | AACCGAGAAGGGCACTCAGCCCCG | 88 |
| 2407 | ACCGAGAAGGGCACTCAGCC | 89 |
| 2408 | CCGAGAAGGGCACTCAGCCC | 90 |
| 2409 | CGAGAAGGGCACTCAGCCCC | 91 |
| 2410 | GAGAAGGGCACTCAGCCCCG | 92 |
| 2411 | AGAAGGGCACTCAGCCCCGC | 93 |
| 2412 | GAAGGGCACTCAGCCCCGCA | 94 |
| 2413 | AAGGGCACTCAGCCCCGCAG | 95 |
| 2414 | AGGGCACTCAGCCCCGCAGG | 96 |
| 2415 | GGGCACTCAGCCCCGCAGGT | 97 |
| 2416 | GGCACTCAGCCCCGCAGGTC | 98 |
| 2417 | GCACTCAGCCCCGCAGGTCC | 99 |
| 2418 | CACTCAGCCCCGCAGGTCCC | 100 |
| 2419 | ACTCAGCCCCGCAGGTCCCG | 101 |
| 2420 | CTCAGCCCCGCAGGTCCCGG | 102 |
| 2421 | TCAGCCCCGCAGGTCCCGGT | 103 |
| 2422 | CAGCCCCGCAGGTCCCGGTG | 104 |
| 2423 | AGCCCCGCAGGTCCCGGTGG | 105 |
| 2424 | GCCCCGCAGGTCCCGGTGGG | 106 |
| 2425 | CCCCGCAGGTCCCGGTGGGA | 107 |
| 2426 | CCCGCAGGTCCCGGTGGGAA | 108 |
| 2427 | CCGCAGGTCCCGGTGGGAAT | 109 |
| 2428 | CGCAGGTCCCGGTGGGAATG | 110 |
| 2429 | GCAGGTCCCGGTGGGAATGC | 111 |
| 2430 | CAGGTCCCGGTGGGAATGCG | 112 |
| 2431 | AGGTCCCGGTGGGAATGCGC | 113 |
| 2432 | GGTCCCGGTGGGAATGCGCG | 114 |
| 2433 | GTCCCGGTGGGAATGCGCGG | 115 |
| 2434 | TCCCGGTGGGAATGCGCGGC | 116 |
| 2435 | CCCGGTGGGAATGCGCGGCC | 117 |
| 2436 | CAACCGAGAAGGGCACTCAG | 87 |
| 2437 | GCAACCGAGAAGGGCACTCA | 86 |
| 2438 | AGCAACCGAGAAGGGCACTC | 85 |
| 2439 | CAGCAACCGAGAAGGGCACT | 84 |
| 2440 | CGGCGCCCGCACCCCATTTATAGG | 136 |
| 2441 | GGCGCCCGCACCCCATTTAT | 137 |
| 2442 | GCGCCCGCACCCCATTTATA | 138 |
| 2443 | CGCCCGCACCCCATTTATAG | 139 |
| 2444 | GCCCGCACCCCATTTATAGG | 140 |
| 2445 | CCCGCACCCCATTTATAGGA | 141 |
| 2446 | CCGCACCCCATTTATAGGAA | 142 |
| 2447 | CGCACCCCATTTATAGGAAG | 143 |
| 2448 | CCGGCGCCCGCACCCCATTT | 135 |
| 2449 | GCCGGCGCCCGCACCCCATT | 134 |
| 2450 | GGCCGGCGCCCGCACCCCAT | 133 |
| 2451 | GTCCAAAGGGCGCCTCCCGGGCC | 195 |
| 2452 | TCCAAAGGGCGCCTCCCGGG | 196 |
| 2453 | CCAAAGGGCGCCTCCCGGGC | 197 |
| 2454 | CAAAGGGCGCCTCCCGGGCC | 198 |
| 2455 | AAAGGGCGCCTCCCGGGCCT | 199 |
| 2456 | AAGGGCGCCTCCCGGGCCTG | 200 |
| 2457 | AGGGCGCCTCCCGGGCCTGA | 201 |
| 2458 | GGGCGCCTCCCGGGCCTGAC | 202 |
| 2459 | GGCGCCTCCCGGGCCTGACC | 203 |
| 2460 | GCGCCTCCCGGGCCTGACCT | 204 |
| 2461 | CGCCTCCCGGGCCTGACCTG | 205 |
| 2462 | GCCTCCCGGGCCTGACCTGT | 206 |
| 2463 | CCTCCCGGGCCTGACCTGTT | 207 |
| 2464 | CTCCCGGGCCTGACCTGTTT | 208 |
| 2465 | TCCCGGGCCTGACCTGTTTG | 209 |
| 2466 | CCCGGGCCTGACCTGTTTGC | 210 |
| 2467 | CCGGGCCTGACCTGTTTGCT | 211 |
| 2468 | CGGGCCTGACCTGTTTGCTT | 212 |
| 2469 | GGTCCAAAGGGCGCCTCCCG | 194 |
| 2470 | AGGTCCAAAGGGCGCCTCCC | 193 |
| 2471 | AAGGTCCAAAGGGCGCCTCC | 192 |
| 2472 | AAAGGTCCAAAGGGCGCCTC | 191 |
| 2473 | AAAAGGTCCAAAGGGCGCCT | 190 |
| 2474 | CAAAAGGTCCAAAGGGCGCC | 189 |
| 2475 | CGTCTTCAGTGCTCTGGCGCGGCC | 341 |
| 2476 | GTCTTCAGTGCTCTGGCGCG | 342 |
| 2477 | TCTTCAGTGCTCTGGCGCGG | 343 |
| 2478 | CTTCAGTGCTCTGGCGCGGC | 344 |
| 2479 | TTCAGTGCTCTGGCGCGGCC | 345 |
| 2480 | TCAGTGCTCTGGCGCGGCCC | 346 |
| 2481 | CAGTGCTCTGGCGCGGCCCT | 347 |
| 2482 | AGTGCTCTGGCGCGGCCCTT | 348 |
| 2483 | GTGCTCTGGCGCGGCCCTTC | 349 |
| 2484 | TGCTCTGGCGCGGCCCTTCC | 350 |
| 2485 | GCTCTGGCGCGGCCCTTCCT | 351 |
| 2486 | CTCTGGCGCGGCCCTTCCTG | 352 |
| 2487 | TCTGGCGCGGCCCTTCCTGT | 353 |
| 2488 | CTGGCGCGGCCCTTCCTGTG | 354 |
| 2489 | TGGCGCGGCCCTTCCTGTGT | 355 |
| 2490 | GGCGCGGCCCTTCCTGTGTC | 356 |
| 2491 | GCGCGGCCCTTCCTGTGTCT | 357 |
| 2492 | CGCGGCCCTTCCTGTGTCTC | 358 |
| 2493 | GCGGCCCTTCCTGTGTCTCA | 359 |
| 2494 | CGGCCCTTCCTGTGTCTCAG | 360 |
| 2495 | GCGTCTTCAGTGCTCTGGCG | 340 |
| 2496 | AGCGTCTTCAGTGCTCTGGC | 339 |
| 2497 | AAGCGTCTTCAGTGCTCTGG | 338 |
| 2498 | CAAGCGTCTTCAGTGCTCTG | 337 |
| 2499 | CCAAGCGTCTTCAGTGCTCT | 336 |
| 2500 | CCCAAGCGTCTTCAGTGCTC | 335 |
| 2501 | CCCCAAGCGTCTTCAGTGCT | 334 |
| 2502 | TCCCCAAGCGTCTTCAGTGC | 333 |
| 2503 | TTCCCCAAGCGTCTTCAGTG | 332 |
| 2504 | CTTCCCCAAGCGTCTTCAGT | 331 |
| 2505 | CCTTCCCCAAGCGTCTTCAG | 330 |
| 2506 | CCCTTCCCCAAGCGTCTTCA | 329 |
| 2507 | TCCCTTCCCCAAGCGTCTTC | 328 |
| 2508 | TTCCCTTCCCCAAGCGTCTT | 327 |
| 2509 | GTTCCCTTCCCCAAGCGTCT | 326 |
| 2510 | GGTTCCCTTCCCCAAGCGTC | 325 |
| 2511 | GGGTTCCCTTCCCCAAGCGT | 324 |
| 2512 | TGGGTTCCCTTCCCCAAGCG | 323 |
| 2513 | CACCGGAAGCTTCAGCCAGCGCTCGCTG | 988 |
| 2514 | ACCGGAAGCTTCAGCCAGCG | 989 |
| 2515 | CCGGAAGCTTCAGCCAGCGC | 990 |
| 2516 | CGGAAGCTTCAGCCAGCGCT | 991 |
| 2517 | GGAAGCTTCAGCCAGCGCTC | 992 |
| 2518 | GAAGCTTCAGCCAGCGCTCG | 993 |
| 2519 | AAGCTTCAGCCAGCGCTCGC | 994 |
| 2520 | AGCTTCAGCCAGCGCTCGCT | 995 |
| 2521 | GCTTCAGCCAGCGCTCGCTG | 996 |
| 2522 | CTTCAGCCAGCGCTCGCTGC | 997 |
| 2523 | TTCAGCCAGCGCTCGCTGCC | 998 |
| 2524 | TCAGCCAGCGCTCGCTGCCT | 999 |
| 2525 | CAGCCAGCGCTCGCTGCCTC | 1000 |
| 2526 | AGCCAGCGCTCGCTGCCTCT | 1001 |
| 2527 | GCCAGCGCTCGCTGCCTCTG | 1002 |
| 2528 | CCAGCGCTCGCTGCCTCTGC | 1003 |
| 2529 | CAGCGCTCGCTGCCTCTGCC | 1004 |
| 2530 | AGCGCTCGCTGCCTCTGCCC | 1005 |
| 2531 | GCGCTCGCTGCCTCTGCCCA | 1006 |
| 2532 | CGCTCGCTGCCTCTGCCCAG | 1007 |
| 2533 | GCTCGCTGCCTCTGCCCAGC | 1008 |
| 2534 | CTCGCTGCCTCTGCCCAGCT | 1009 |
| 2535 | TCGCTGCCTCTGCCCAGCTG | 1010 |
| 2536 | CGCTGCCTCTGCCCAGCTGG | 1011 |
| 2537 | CCACCGGAAGCTTCAGCCAG | 987 |
| 2538 | CCCACCGGAAGCTTCAGCCA | 986 |
| 2539 | TCCCACCGGAAGCTTCAGCC | 985 |
| 2540 | TTCCCACCGGAAGCTTCAGC | 984 |
| 2541 | TTTCCCACCGGAAGCTTCAG | 983 |
| 2542 | ATTTCCCACCGGAAGCTTCA | 982 |
| 2543 | CATTTCCCACCGGAAGCTTC | 981 |
| 2544 | CCATTTCCCACCGGAAGCTT | 980 |
| 2545 | CCCATTTCCCACCGGAAGCT | 979 |
| 2546 | GCCCATTTCCCACCGGAAGC | 978 |
| 2547 | TGCCCATTTCCCACCGGAAG | 977 |
| 2548 | CTGCCCATTTCCCACCGGAA | 976 |
| 2549 | ACTGCCCATTTCCCACCGGA | 975 |
| 2550 | CACTGCCCATTTCCCACCGG | 974 |
| 2551 | GCACTGCCCATTTCCCACCG | 973 |
| 2552 | CGAGTGGGAGGCGGCCAGGAGCAAGCCG | 1281 |
| 2553 | CGTACACTCACGGAAATGCTGTAAAG | 2533 |
| 2554 | GTACACTCACGGAAATGCTG | 2534 |
| 2555 | TACACTCACGGAAATGCTGT | 2535 |
| 2556 | ACACTCACGGAAATGCTGTA | 2536 |
| 2557 | CACTCACGGAAATGCTGTAA | 2537 |
| 2558 | GCGTACACTCACGGAAATGC | 2532 |
| 2559 | TGCGTACACTCACGGAAATG | 2531 |
| 2560 | TTGCGTACACTCACGGAAAT | 2530 |
| 2561 | CTTGCGTACACTCACGGAAA | 2529 |
| 2562 | ACTTGCGTACACTCACGGAA | 2528 |
| 2563 | GACTTGCGTACACTCACGGA | 2527 |
| 2564 | TGACTTGCGTACACTCACGG | 2526 |
| 2565 | CTGACTTGCGTACACTCACG | 2525 |
| 2566 | GCTGACTTGCGTACACTCAC | 2524 |
| 2567 | AGCTGACTTGCGTACACTCA | 2523 |
| 2568 | GAGCTGACTTGCGTACACTC | 2522 |
| 2569 | TGAGCTGACTTGCGTACACT | 2521 |
| 2570 | TTGAGCTGACTTGCGTACAC | 2520 |
| 2571 | GTTGAGCTGACTTGCGTACA | 2519 |
| 2572 | TGTTGAGCTGACTTGCGTAC | 2518 |
| 2573 | TTGTTGAGCTGACTTGCGTA | 2517 |
| 2574 | ATTGTTGAGCTGACTTGCGT | 2516 |
| 2575 | AATTGTTGAGCTGACTTGCG | 2515 |
| 2576 | CGTCACAGCCAATAATGAGCGTACGC | 4862 |
| 2577 | GTCACAGCCAATAATGAGCG | 4863 |
| 2578 | TCACAGCCAATAATGAGCGT | 4864 |
| 2579 | CACAGCCAATAATGAGCGTA | 4865 |
| 2580 | ACAGCCAATAATGAGCGTAC | 4866 |
| 2581 | CAGCCAATAATGAGCGTACG | 4867 |
| 2582 | AGCCAATAATGAGCGTACGC | 4868 |
| 2583 | GCCAATAATGAGCGTACGCA | 4869 |
| 2584 | CCAATAATGAGCGTACGCAA | 4870 |
| 2585 | ACGTCACAGCCAATAATGAG | 4861 |
| 2586 | GACGTCACAGCCAATAATGA | 4860 |
| 2587 | AGACGTCACAGCCAATAATG | 4859 |
| 2588 | CAGACGTCACAGCCAATAAT | 4858 |
| 2589 | TCAGACGTCACAGCCAATAA | 4857 |
| 2590 | ATCAGACGTCACAGCCAATA | 4856 |
| 2591 | AATCAGACGTCACAGCCAAT | 4855 |
| 2592 | TAATCAGACGTCACAGCCAA | 4854 |
| 2593 | ATAATCAGACGTCACAGCCA | 4853 |
| 2594 | CATAATCAGACGTCACAGCC | 4852 |
| 2595 | GCATAATCAGACGTCACAGC | 4851 |
| 2596 | GGCATAATCAGACGTCACAG | 4850 |
| 2597 | GGGCATAATCAGACGTCACA | 4849 |
| 2598 | AGGGCATAATCAGACGTCAC | 4848 |
| 2599 | AAGGGCATAATCAGACGTCA | 4847 |
| 2600 | GAAGGGCATAATCAGACGTC | 4846 |

```
Hot Zones (Relative upstream location to gene start site)
  1-600
  700-1400
2450-2650
3450-3700
4600-5000
```

Genetic Code (5′ Upstream Region)

(SEQ ID NO: 11958)

TGCATATGAAAGAAACCTATTCACATGGACCATATTACATTATAATCACA
GTGTTTACTGCTTGACTACCATCTGCCTGGCCTAGCAAGGGTGTCAGTGA
GGAAGAGAGGACAAGGGGTACCAATCTGTGAACTACACATGGTTCTTGCT
CTCCCAGCTTCTCTCTCCCATTGGCAAGGCAACAGGTAAACACATGAAAA
ATCAAATAATGCTATAAGAGAAAAATGTATTCAGGACAACAACAGGTTTG
TATGAAGGCCTTTCATCATCGTTGTCCTACCTAGAAACTGAATGACAGGG
AATCAGAGTCACAAGCTATGAAGTCTAACTGGGCTGTTCCCAGAGAAAGA
TTCAGTGCAGTAGGTGGGGCTGCAGCCAGCCCTGGGTGGGTGGAAGGATG
ACATCCACATAGGCAAGAGGGTGATAATTCACTTACGCAGCTCCTCACTG
CACATTGAACCCTGCTGACTTCTGGCTTCTCTCCCGGGAGGAACTGCGAC
TCAACATTCTGACCTTATCTCTTGGGTAGCAGAATGATGGAGAAGGAAAG
TTTCTTTTTGCTTCTCGCAGGGGTTAATCATCCATCTGGAATGCCTACAT
TTGGTTGACAATGGCTCACCCTATCATCTTCCTCCTGAACCATTCACCTA
AATGTGCCATTTCTTTCCTGATAGTTCTCATTTGTGTGTGTGTGTGTGTG
TGTGTGTGTGTGCACGTGCTCACACATGCATGCTGTCACTGGGTAAACAG
GCCACCCTGGGCACAGTTCCATCTACAATGTTTGAAGTTTACTTTCCAGC
TTCTGGGCATCATTTGCAATTATAATGCTGTCATAGGCAGAAACGAGATA
GGCTAATTAATCGTTGTCAATACTGATCCCTATTTGCCAGATGAGATTTT
GGAGCAGCATGGCTGGGAATAATTGGTATAGACTGTATTTCCTTGCTTTA
TGTCACTGGAAATATTTATTTAAGCATCACGGTCGCTATGCATAAATATC
CTGGAAAATGGGGTATAGCTGAATGGTGCAGATTCATTCATTCATATTCA
GCAAATTATGTTCTAAGCACCTACTTCAGTATGTGAACAGCACTAAACTC
AGAATATTGGTCTGCTGGGGTCCTTTATTAGCTTCCATGATTCCCTGAAC
TTGGCCAAGACCCTTCTGGTCGGCTGCAGATAGGCACAATGGATAGTTTT
GCTTCTAGATAATGTAACTGGGACATTCAGCATTATCTATCGCCTTGAAA
TTCCTCTAGTCAGGTGGCTTTCTAATGGGTACCCAGAGCCCTATGACTAC
CCAGATTGATGGTGCACCCAACAGGACTTTGCATTTATGAGCTGATAAGT
CACAGTCACTAGCTGAGATTAATCTGTGTGACACCAGAATGTGTCTCTAT
CTAAAGGAAAAGGGATGAAGGGTGATATCTTTGGTCACAAGTAATGTATT
TCCATGTAGTCTTTGACAAAGGATCTAAGTGGATTTTGTAATTGAAGAAA
AATCTATGCACTAATCTTTACAGCATTTCCGTGAGTGTACGCAAGTCAGC
TCAACAATTCAACATTTGCTCTGTGGGGTTGTGCTAGACCCTGTCAGGGG
ATAACTACTGCTGGCTGGGGCCCAGTTCAGGGAAGACTTGCCAAAGACCA
TCAGGAAAAGAGGGAAGCTGAGTCTTAGGTTTCTTCCTTTAGAGATGGTG
ACAGTCCTCTCACCACCTCCAAGCATCTCACAATGTTTCCCTGCCTCCAA
GTCATCAAATTCATTTTTGATTCCTACTTCATAAAAATTACATTCTCCCA
GCACTTTGGGAGGCCAAGGCGGGCAGATCATGAGGTCAGGAGTTCAAGAC
CAGCCTGATCAACATGGTGAAACACCGTCTCTACTAAAAATACAAAAATT
AGCTGGGCATAGTGGCACTCACCTGTTATCTCAGTTACTTGGGAGGCTAA
GGCAGGAGAATCGCTTAAACCCGGGAGGCAGAGGTTGCAGTGAGCCGAGA
TTGTACCACTACACTCCAGCCTGGGTGACAGAGGGAGACTCCATCTCAAA
TAAATAAATTAAAAAAAAAAATATATATATATATGTATATATTCTCTATG
GATGCTGACCATTGGACCCTGGTTTCATCTGCACGTAACAGAGTAAGCTT
GGACTTGTGCTTGTAAATTAAAGCTCGACACCTCCTTTTGGCTTCTCTAT
ACCTGAATATTCTTACTCACTCTCCTTAATGTGAATATGCATGGAAGCAG
GACCATTTCCTCAAACACTAGCAGCAGCGAACCCTGTGGAAAGTCAGTCC
ACATAGAATAATTCAAATAAAGTGTTCAGAGAAATGGGGTTTCAGAGCAA
TTACTTTTTCCAGACCTTTCACAAATCAGTGGTGTAGGTATGACCAGCCT
TGAGTTGAGACCTCTGTAATATCCATCTTTAATAACATTAATATGCTGTG
GATGAGCAACTGATCACTGGAGGGAGTTTAGCTGCCCATAGGAGTTCATG
GCTAATGACAATATCTGAATAAGGACAGGTGTGGAGCCCAGGTGCAGGAA
GCAGGCGAAGGTCTTTCTGTGAGTCTCCTCTGAGGGAACTGGGTCTTTAT
ACATAGTTACTGTTTCAGAATTGATCCTTCTGGAATCATCAGTCTTCACC
AGTAGCTTGTTACATCTGGGGTTATCTCATAATTCAAACAAAGCTGACAA
GTTGTAACAATGAGCACACACTGACTTCTGCAACAGGCGCTGTCCACTTC
CCATCCGCACTCTACCGGCTTGCTCCTGGCCGCCTCCCACTCGCCTTCCT
GGGTGGTCCCCCAGCAGTTATACCTACCTGGTTGTCGCCCCCTCTATCCT
ACCACAATTGCTCACTAGCGGTTTCCTGCGTACACAGCTTGTCTCCCTAA
CCAGAGTGGAGGTGCCTTGGGGACACAGCCAGGCTCAGACATTCACTCAG
CTCATCATAGTGCCATCCCATCAATAACCCCTTCTGAGTGATCCTGGGTT
AGTAAACCGAGTGTCCCTGAAATTCCACTACCGCTGATTCCCTCCAGCTG
GGCAGAGGCAGCGAGCGCTGGCTGAAGCTTCCGGTGGGAAATGGGCAGTG
CCTAGAAGAGAAGGAAACGATGCATGAGAAGGTTCCAGATGTCTATGAGG
AACATGACGTGTCCTGTCCACTACTCTGCTTTTCCTCGTCCGCCTCCCCA
CCACTGGAGGAAACCTAGAAGCTGGTGCAGGAAATCCTCCTCTCAACAAC
CCAAGAACACTTTGCACAAGAGGGGTGCGCCCTCGGAGGTTGCTCTTCCC
CAGAGGCCTCTCCTCGCTGGGGTTTCTTGAAGACAGATACTTGGACTCCT
GCTGGGACCAGGCAGGCCACCCATCCTCAGGGGCAGTGACTGGTCACTCA
CCAGACCTCCCTGCATCCCCCTTCTCTCTCCTCCCCCAGCACGGGCTGAA
CCCCGCAGCCACAGATTCTGATCAGGATTAGGGTGTGGGTGCAAATCCAA
GGTCCACCAAAATGGAAAAGAAGTAACCGATGGGAACACGTCTCCACCAA
GACAGCGCTCAGGACTGGTTCTCCTCGTGGCTCCCAATTCAGTCCAGGAG
AAGCAGAGATTTTGTCCCCATGGTGGGTCATCTGAAGAAGGCACCCCTGG
TCAGGGCAGGCTTCTCAGACCCTGAGGCGCTGGCCATGGCCCCACTGAGA
CACAGGAAGGGCCGCGCCAGAGCACTGAAGACGCTTGGGGAAGGGAACCC
ACCTGGGACCCAGCCCCTGGTGGCTGCGGCTGCATCCCAGGTGGGCCCCC
TCCCCGAGGCTCTTCAAGGCTCAAAGAGAAGCCAGTGTAGAAAAGCAAAC
AGGTCAGGCCCGGGAGGCGCCCTTTGGACCTTTTGCAATCCTGGCGCTCT
TGCAGCCTGGGCTTCCTATAAATGGGGTGCGGGCGCCGGCCGCGCATTCC
CACCGGGACCTGCGGGGCTGAGTGCCCTTCTCGGTTGCTGCCGCTGAGGA
GCCCGCCCAGCCAGCCAGGGCCGCGAGGCCGAGGCCAGGCCGCAGCCCAG
GAGCCGCCCCACCGCAGCTGGCGATG

[0336] 10) IL17. Interleukin 17 is a cytokine is a potent mediator in delayed-type reactions by increasing chemokine production in various tissues to recruit monocytes and neutrophils to the site of inflammation. IL-17 is produced by T-helper cells and is induced by IL-23 which results in destructive tissue damage in delayed-type reactions. Interleukin 17 as a family functions as a proinflammatory cytokine that responds to the invasion of the immune system by extracellular pathogens and induces destruction of the pathogen's cellular matrix. Interleukin 17 acts synergistically with tumor necrosis factor and interleukin-1 (Chiricozzi et al., J Invest Dermatol. 2011 March; 131(3):677-87, Miossec et al., N. Engl. J. Med. 361 (9): 888-98). Most notably IL is involved in inducing many immune signaling molecules and mediating proinflammatory responses (e.g. allergic responses). IL-17 induces the production of many other cytokines (such as IL-6, G-CSF, GM-CSF, IL-1β, TGF-β, TNF-α), chemokines (including IL-8, GRO-α, and MCP-1), and prostaglandins (e.g., PGE2) from many cell types (fibroblasts, endothelial cells, epithelial cells, keratinocytes, and macrophages). The release of cytokines causes many functions, such as airway remodeling, a characteristic of IL-17 responses. The increased expression of chemokines attracts other cells including neutrophils. IL-17 function is also essential to a subset of CD4+ T-Cells called T helper 17 (Th17) cells. As a result of these roles, the IL-17 family has been linked to many immune/autoimmune related diseases including rheumatoid arthritis, psoriasis, ankylosing spondylitis asthma, lupus, allograft rejection and anti-tumor immunity (reviewed in Miossec and Kolls, Nature Reviews Drug Discovery 11, 763-776).

[0337] Protein: IL17 Gene: IL17A (Homo sapiens, chromosome 6, 52051185-52055436 [NCBI Reference Sequence: NC_{—}000006.11]; start site location: 52051230; strand: positive)

Targeted Sequences

| | | Relative |
|---|---|---|
| | | upstream |
| | | location |
| Sequence | | to gene |
| ID No: | Sequence (5′-3′) | start site |
| 2601 | CTTGTTTGTATCCGCATGGCTGTGCTC | 4451 |
| 2616 | CGAGACCGTTGAGGTGGAGTG | 3148 |
| 2635 | GGTCACTTACGTGGCGTGTCGC | 107 |
| 2664 | GACAAAATGTAGCGCTATCG | 55 |

Target Shift Sequences

| | | Relative |
|---|---|---|
| | | upstream |
| | | location |
| Sequence ID | | to gene |
| No: | Sequence (5′-3′) | start site |
| 2601 | CTTGTTTGTATCCGCATGGCTGTGCTC | 4451 |
| 2602 | TTGTTTGTATCCGCATGGCT | 4452 |
| 2603 | TGTTTGTATCCGCATGGCTG | 4453 |
| 2604 | GTTTGTATCCGCATGGCTGT | 4454 |
| 2605 | TTTGTATCCGCATGGCTGTG | 4455 |
| 2606 | TTGTATCCGCATGGCTGTGC | 4456 |

Gene Identification

| | |
|---|---|
| GeneID | 3605 |
| HGNC | 5981 |
| HPRD | 04396 |
| MIM | 603149 |

| | | |
|---|---|---|
| 2607 | TGTATCCGCATGGCTGTGCT | 4457 |
| 2608 | GTATCCGCATGGCTGTGCTC | 4458 |
| 2609 | TATCCGCATGGCTGTGCTCC | 4459 |
| 2610 | ATCCGCATGGCTGTGCTCCT | 4460 |
| 2611 | TCCGCATGGCTGTGCTCCTG | 4461 |
| 2612 | CCGCATGGCTGTGCTCCTGA | 4462 |
| 2613 | CGCATGGCTGTGCTCCTGAG | 4463 |
| 2614 | GCTTGTTTGTATCCGCATGG | 4450 |
| 2615 | TGCTTGTTTGTATCCGCATG | 4449 |
| 2616 | CGAGACCGTTGAGGTGGAGTG | 3148 |
| 2617 | CCGAGACCGTTGAGGTGGAG | 3147 |
| 2618 | TCCGAGACCGTTGAGGTGGA | 3146 |
| 2619 | ATCCGAGACCGTTGAGGTGG | 3145 |
| 2620 | AATCCGAGACCGTTGAGGTG | 3144 |
| 2621 | CAATCCGAGACCGTTGAGGT | 3143 |
| 2622 | TCAATCCGAGACCGTTGAGG | 3142 |
| 2623 | TTCAATCCGAGACCGTTGAG | 3141 |
| 2624 | TTTCAATCCGAGACCGTTGA | 3140 |
| 2625 | GTTTCAATCCGAGACCGTTG | 3139 |
| 2626 | GGTTTCAATCCGAGACCGTT | 3138 |
| 2627 | AGGTTTCAATCCGAGACCGT | 3137 |
| 2628 | CAGGTTTCAATCCGAGACCG | 3136 |
| 2629 | TCAGGTTTCAATCCGAGACC | 3135 |
| 2630 | CTCAGGTTTCAATCCGAGAC | 3134 |
| 2631 | ACTCAGGTTTCAATCCGAGA | 3133 |
| 2632 | GACTCAGGTTTCAATCCGAG | 3132 |
| 2633 | TGACTCAGGTTTCAATCCGA | 3131 |
| 2634 | CTGACTCAGGTTTCAATCCG | 3130 |
| 2635 | GGTCACTTACGTGGCGTGTCGC | 107 |
| 2636 | GTCACTTACGTGGCGTGTCG | 108 |
| 2637 | TCACTTACGTGGCGTGTCGC | 109 |
| 2638 | CACTTACGTGGCGTGTCGCA | 110 |
| 2639 | ACTTACGTGGCGTGTCGCAG | 111 |
| 2640 | CTTACGTGGCGTGTCGCAGT | 112 |
| 2641 | TTACGTGGCGTGTCGCAGTG | 113 |
| 2642 | TACGTGGCGTGTCGCAGTGG | 114 |
| 2643 | ACGTGGCGTGTCGCAGTGGG | 115 |
| 2644 | CGTGGCGTGTCGCAGTGGGT | 116 |
| 2645 | GTGGCGTGTCGCAGTGGGTT | 117 |
| 2646 | TGGCGTGTCGCAGTGGGTTC | 118 |
| 2647 | GGCGTGTCGCAGTGGGTTCA | 119 |
| 2648 | GCGTGTCGCAGTGGGTTCAG | 120 |
| 2649 | CGTGTCGCAGTGGGTTCAGG | 121 |
| 2650 | GTGTCGCAGTGGGTTCAGGG | 122 |
| 2651 | TGTCGCAGTGGGTTCAGGGG | 123 |
| 2652 | GTCGCAGTGGGTTCAGGGGT | 124 |
| 2653 | TCGCAGTGGGTTCAGGGGTG | 125 |
| 2654 | CGCAGTGGGTTCAGGGGTGA | 126 |
| 2655 | TGGTCACTTACGTGGCGTGT | 106 |
| 2656 | GTGGTCACTTACGTGGCGTG | 105 |
| 2657 | TGTGGTCACTTACGTGGCGT | 104 |
| 2658 | CTGTGGTCACTTACGTGGCG | 103 |
| 2659 | TCTGTGGTCACTTACGTGGC | 102 |
| 2660 | TTCTGTGGTCACTTACGTGG | 101 |
| 2661 | CTTCTGTGGTCACTTACGTG | 100 |
| 2662 | CCTTCTGTGGTCACTTACGT | 99 |
| 2663 | TCCTTCTGTGGTCACTTACG | 98 |
| 2664 | GACAAAATGTAGCGCTATCG | 55 |
| 2665 | GGACAAAATGTAGCGCTATC | 54 |

Hot Zones (Relative upstream location to gene start site)
1-150
2900-3250
4250-4600

### Examples

Genetic Code (5′ Upstream Region)

(SEQ ID NO: 11959)

CACTGTTCAGGACGGCCCTCAGGAGCACAGCCATGCGGATACAAACAAGC
ATTATGCTGGAGAGGAACAATGATGCTATCAGGTTGGTACCAAGACTGAT
ACTTCCTATTTAAGAAATCATGTTAATTATATAGGTATTAAGTTCTGGTT
TTTGCAAGACAACATCGGTAACCTCAGAGATGAACTTCTAGTATGTAATA
GTATTGATATCTTCAAATTCAGGGTAGATGATCTAGAGCTTGATAAACTG
GGTCTAAATCTGAGTCTCAATTAAATCCTGATTTTATCAACTCCCCAAGG
CCTTCCAGATGGCTCTCTATTGCAAATCTTCTCCTCTCTAAACATCACGT
CTTCCTTTTAAATGTCTGTTTGACATTGCTCCTTGTGTGCTGGCCCATTT
GCAAAGTATCAGCCCCTACATTTAAAATCCAAGAGAATTCTCTCCAACGA
CTCATTTATTCTCTCTATATTAAGTGAAGATCAAGAGAGTAGTCTTGCCT
GGTGATGTGCACAGCATTAATCAAAATGGCTCCAATCTTTTTGAACAGCC
ACCATCTTTTATTAACTTTAAGCAGAAACAATGGCATGATGCCTCCTCCT
ATACTGAGACCTTTGTTACTTTTATAAAATGGCTATAGAATATAAATTTA
AAATATATTAATCTCTCAATGGTAACCTTACTACCTAAGCAAAAATTAAA
ATTTATTTATTTTATCTTTTAGCAAGCCTTAATTTTCCACCACACTGAGA
CAAAAGACTCAAAAATACTCTCTCCAGGACACAAAAGGAAAAATTTTTCT
TTCCATCCCTTACATTATTCTCTATTGCAAGTAGAAAGAAATACTGTTTA
ATGGCCTAATAATTTCAAGGAGCCTTGAAAATCATTTCTCTAAATCAAGA
AGGGCAGAAACATTTTACCACTATCATCCCTTCAAATGCATGTTTGTCTC
CTGGAAATCTTTCCCTGTCTCCAGTTGCATACTTGCCCCCACCCATTGAA
GCTCTGAACTCACAACATGCAGTTCCCCATTGCTTATGGTGATCTGTTTC
AAGCCCTCAGAGAAGCAAGATTGATAAACCTGGAAGACAATCACTAACAA
AATAATCATCCCTAATTTACTACTCCCATTTGTTCTTTACTATATTCATC
TCCAGAAAATCATAGATGATCAAAAGATTACCTGGTGCAAAACTCATTTT
ATAAGACAGGAAACTAAGCCTCAAAGAGGTGAGGTACCCAAGGGCATGGG
TAGTTAGTGGCAGATTCACAGTGAAAACAAAGGTGTCCTCTCATTCAGTG
TTCTAGGCACTCTAATGCCCAGTCCAGCATGCACTCCACCTCAACGGTCT
CGGATTGAAACCTGAGTCAGCTGGCTCTGCAGACAAATGCAGAGGAAGAG
CCCTGCCCACTGTGAACACACTCTTACACTTCCAGCTGCTCCTCCAGGAG
CCACAGGCTTCCAGCTCAAGCAAACGTCTGGGAAATCAGCCATACTCAAG
GCTGCACACACCCAGCTCCAACCACCATGTCAAAATGATCCTTTTAACAC
TTCTGTGAAAACCCATTTTGTTTCCCCATTTTATTTTAAAGCATTTCAAA
GCATAGCACACAGGCTGAATTACATAGGCACAGGAGGCAAGACTAGGGAA
AACAGCTAGAGTCAGCTTCTCCCCCTGCAACTTCAATCAAAATAGTTCAC
AGTAAGCACATTCTCCCCTCCTTCTTCCTTGCCAGAAAGCAACAACAAGG
AATCCTCCACTCCAGGGTGATCCTGAATAGGCTATAGCCTCATCACACTA
AGTTCAAAAGGATCAGAATGCAGAGCCAAGGCACTAGACAACTCAGTAGG
GTTATTGAGATGCAGGTAGGTTCTAAGAAGAATATAGAAAATTCTGAACT
TCTCAAATAACATTACTCATACTGTCAATTAATCAAAATGTTGAACAGCT
ATTACTTACTAGACACTATGCTAAGTGCTACAAAGACCAATAAGACTACT
TGTCTTCAGGTAGCTTGTAGTCTAGCAAGAAATGAGCTACAAAGAAAACA
AGAAAGTCAGTATGTAAATGAATGGCATGCAATACACTAGAAATATGCAT
GAACAGCCCTGTATCAGAGAAGAACAAGCAACACAAAAGCAGTCTGTGAA
GACCCATGTTGTATAAAGGGCCACATTAGGCACCATAGGAGTCACAAAGT
TGAAGAACATACTAGCCTTGAAGGCTGACAGTAAAATCTAAACATGGAAA
TAAACACATATCTTACCCATAGCTTTTAAAGCCAAATGAAACACATTACA
AAATGAAAGAAAAGTTACTAGAGAGGTAGGTGTAAGCTACATGTGATGGA
TGGAACTATTTATTTCAACTGAGGTAATCAGGCCAGACCTGTGAGATACA
TTTAAACAGGATTTTGAAGGACAAGTAGCATTTTGATAACCTGAGGATGG
GGAAGGGCATTTCAGAAACAATACCTTAACAAAGGGTGGGTAAGCTTTGA
AAGAAGGCCTGGAGAAAAATCAGGACCCCATCATCCCAGGTCCTGGAGCA
TGGTGGGGGGTAAGGCTAGAAAGGAAGTTGTACGAACTCAAATATTAATT
CAAATGCTAAGAGGCTTACCCTTCATTCTGTATGCAAGCTAATGGCAGAA
GAAAAGGCACAATTAGAGCCATGCTTTGAGAATCATTATTGAAAGCATGT
CGAAGATGGTCTGAAGGAAGCAATTGGGAAAAGCAAGCATAGCTCATCCA
AGTGGGTGAGAGTGTGAGTTAGAGGAAGCTTGGAAATTGGTGATGTGAGA
GATGCTGCAGCTTCTGGGATTGCTGCCTGGTCGTGTGTAGAGGAGGGGCA
GTAGGGCTCATTCTGAATCTTGTCTTGAAAAGCACATAGATAGTGATGCC
AAAACCAGGACTACGGAAATCACTTGAAGCTGTATCCTACCTCCTCCTCC
ATCTGTATCTGCTTCACCTATCAAGGATATCTACTATTGCCACTAAAATT
CAGGTGCTTATGGCCTCCCTCATTCATCAGCCAGGGTTTATCTGGCCAGG
AAAGAGAAGCCCCTTCAGGCATTTGCAACAGAGGGAGTTTAAGTCAGAGA
ACTAGTCACCCTGGTAGTTGAGATTGCCATCAGCAAGAAGCTGTTACCAT
TTGAAGGCTGCAGGGACAAAGGGAGTGAGCAGTCCTCTGGGAGACTGAGG
AAGGAAGCTCCTGGCTTCTCCCCACTTTCCACTTTCCACTTCCCACTTTT
ACTCATCTGTCCTCCAATTCCCTTTTGGCTGAGCCTAGCTGAAACCCAGC
TGACAGGGGAGTTTGAGCAAGCAGCCTCCAGGGTCAGCCCTCTGAGTTAC
AGGTAGAGCAGGACAGGGAGGAATGGATCTCAGGACAAACAGGTTCAGGA
TCCGGCAAACTAATTTTACACTCCAGCCATTGAGTTGGAACTACTGGCCA
GCCTCCCCCCGAGTTAGCATGTAGAATATGGGATACCAGCTGAGTGCCTG
AGAGTTATCATTCACCTCAGTGGGGGTAGGGGCGGAGAAGGGTGACATAT
AGCCAGCCACATCTATATCCACTGGCCCTTCCTTGTCCTAGTCCTCTGTA
TTCCTGAGAAGGAACTATTCTCAAGGACCTGAGTCCAAGTTCATCTTACT
TAGAGTACAGAGAAAAGAACCGCTAACTCCTTCTCTCTTTCCCCCATCAT
GTCTCCTCTCCTTTCTAGTTCTCATCACTCTCTACTCCCCCCTGCCCCCC
TTTTCTCCATCTCCATCACCTTTGTCCAGTCTCTATCCCCATTTTCAATT
CCTTCCTCAAAACACCAAGTTGCTTGGTAGCATGCAGGGTTGGAACATGC
CTTTAACAGAAAATCTCGTGTCTCTTGAACCTAGTTATTTATTCCTTGAG
CAGAGTAGATATTCAACAAAAGAATTGTTAAATTCAATTAAATAGGATAT
ATCTTATTATTAAATATTTTTTTCATTTTTTGTTTACTTATATGATGGGA
ACTTGAGTAGTTTCCGGAATTGTCTCCACAACACCTGGCCAAGGAATCTG
TGAGGAAAAGAAAGATCAAATGGAAAATCAAGGTACATGACACCAGAAGA
CCTACATGTTACTTCAAACTTTTTCTTCCTCATGAACCATTAAAATAGAG
CATAACTCTTCTGGCAGCTGTACATATGTTCATAAATACATGATATTGAC
CCATAGCATAGCAGCTCTGCTCAGCTTCTAACAAGTAAGAATGAAAAGAG
GACATGGTCTTTAGGAACATGAATTTCTGCCCTTCCCATTTTCCTTCAGA
AGGAGAGATTCTTCTATGACCTCATTGGGGGCGGAAATTTTAACCAAAAT
GGTGTCACCCCTGAACCCACTGCGACACGCCACGTAAGTGACCACAGAAG
GAGAAAAGCCCTATAAAAAGAGAGACGATAGCGCTACATTTTGTCCATCT
CATAGCAGGCACAAACTCATCCATCCCCAGTTGATTGGAAGAAACAACGA
TG

[0339] 11) MMP2. Matrix metalloproteinase-2 (MMP-2) is also known as 72 kDa type IV collagenase and gelatinase A is an enzyme that in humans is encoded by the MMP2 gene (Devarajan et al, 1992; J. Biol. Chem. 267 (35): 25228-32). The matrix metalloproteinase (MMP) family are involved in the breakdown of extracellular matrix in normal physiological processes, such as embryonic development, reproduction, and tissue remodeling, as well as in disease processes, such as arthritis and metastasis. Most MMPs are secreted as inactive proproteins which are activated when cleaved by extracellular proteinases. This gene encodes an enzyme which degrades type IV collagen, the major structural component of basement membranes. The enzyme plays a role in endometrial menstrual breakdown, regulation of vascularization and the inflammatory response. Mutations in the MMP2 gene are associated with Torg-Winchester syndrome, multicentric osteolysis and arthritis syndrome (Martignetti et al., 2001, Nat. Genet. 28 (3): 261-5).

[0340] Protein: MMP2 Gene: MMP2 (Homo sapiens, chromosome 16, 55513081-55540586 [NCBI Reference Sequence: NC_{—}000016.9]; start site location: 55513392; strand: positive)

Gene Identification

| | |
|---|---|
| GeneID | 4313 |
| HGNC | 7166 |
| HPRD | 00386 |
| MIM | 120360 |

Targeted Sequences

| | | Relative |
|---|---|---|
| | | upstream |
| | | location |
| Sequence | | to gene |
| ID No: | Sequence (5′-3′) | start site |
| 2666 | GCTCCCTGGCCCCGCGCGTCGC | 9 |
| 2732 | CCGCGGCGCAGGGCTGCGCTCCGAG | 85 |
| 2865 | GCCGCCTGCTACTCCTGGCCTC | 453 |
| 2869 | GCGCACTCGGGCCCGCCCCTCTCTGCCC | 361 |
| 2891 | CGCTCCGAGGGTCCGCTGGCTCGG | 101 |
| 3024 | GTCCACCCTCAGTGCACGACCTCGT | 478 |
| 3066 | CACCGCCTGAGGAAGTCTGGATGC | 239 |
| 3101 | TGCCTCTCTCGCGATCTGGGCG | 512 |
| 3131 | GAGGGACGCCGGCTTGGCTAGGAC | 618 |

Target Shift Sequences

| | | Relative |
|---|---|---|
| | | upstream |
| | | location |
| Sequence | | to gene |
| ID No: | Sequence (5′-3′) | start site |
| 2666 | GCTCCCTGGCCCCGCGCGTCGC | 7 |
| 2667 | CTCCCTGGCCCCGCGCGTCG | 8 |
| 2668 | TCCCTGGCCCCGCGCGTCGC | 9 |
| 2669 | CCCTGGCCCCGCGCGTCGCC | 10 |
| 2670 | CCTGGCCCCGCGCGTCGCCC | 11 |
| 2671 | CTGGCCCCGCGCGTCGCCCG | 12 |
| 2672 | TGGCCCCGCGCGTCGCCCGG | 13 |
| 2673 | GGCCCCGCGCGTCGCCCGGG | 14 |
| 2674 | GCCCCGCGCGTCGCCCGGGG | 15 |
| 2675 | CCCCGCGCGTCGCCCGGGGG | 16 |
| 2676 | CCCGCGCGTCGCCCGGGGGT | 17 |
| 2677 | CCGCGCGTCGCCCGGGGGTC | 18 |
| 2678 | CGCGCGTCGCCCGGGGGTCG | 19 |
| 2679 | GCGCGTCGCCCGGGGGTCGC | 20 |
| 2680 | CGCGTCGCCCGGGGGTCGCT | 21 |
| 2681 | GCGTCGCCCGGGGGTCGCTG | 22 |
| 2682 | CGTCGCCCGGGGGTCGCTGG | 23 |
| 2683 | GTCGCCCGGGGGTCGCTGGC | 24 |
| 2684 | TCGCCCGGGGGTCGCTGGCT | 25 |
| 2685 | CGCCCGGGGGTCGCTGGCTC | 26 |
| 2686 | GCCCGGGGGTCGCTGGCTCG | 27 |
| 2687 | CCCGGGGGTCGCTGGCTCGG | 28 |
| 2688 | CCGGGGGTCGCTGGCTCGGT | 29 |
| 2689 | CGGGGGTCGCTGGCTCGGTG | 30 |
| 2690 | GGGGGTCGCTGGCTCGGTGC | 31 |
| 2691 | GGGGTCGCTGGCTCGGTGCG | 32 |
| 2692 | GGGTCGCTGGCTCGGTGCGT | 33 |
| 2693 | GGTCGCTGGCTCGGTGCGTG | 34 |
| 2694 | GTCGCTGGCTCGGTGCGTGT | 35 |
| 2695 | TCGCTGGCTCGGTGCGTGTG | 36 |
| 2696 | CGCTGGCTCGGTGCGTGTGG | 37 |
| 2697 | GCTGGCTCGGTGCGTGTGGC | 38 |
| 2698 | CTGGCTCGGTGCGTGTGGCC | 39 |
| 2699 | TGGCTCGGTGCGTGTGGCCG | 40 |
| 2700 | GGCTCGGTGCGTGTGGCCGC | 41 |
| 2701 | GCTCGGTGCGTGTGGCCGCC | 42 |
| 2702 | CTCGGTGCGTGTGGCCGCCT | 43 |
| 2703 | TCGGTGCGTGTGGCCGCCTC | 44 |
| 2704 | CGGTGCGTGTGGCCGCCTCG | 45 |
| 2705 | GGTGCGTGTGGCCGCCTCGC | 46 |
| 2706 | GTGCGTGTGGCCGCCTCGCC | 47 |
| 2707 | TGCGTGTGGCCGCCTCGCCG | 48 |
| 2708 | GCGTGTGGCCGCCTCGCCGC | 49 |
| 2709 | CGTGTGGCCGCCTCGCCGCC | 50 |
| 2710 | GTGTGGCCGCCTCGCCGCCT | 51 |
| 2711 | TGTGGCCGCCTCGCCGCCTG | 52 |
| 2712 | GTGGCCGCCTCGCCGCCTGG | 53 |
| 2713 | TGGCCGCCTCGCCGCCTGGT | 54 |
| 2714 | GGCCGCCTCGCCGCCTGGTT | 55 |
| 2715 | GCCGCCTCGCCGCCTGGTTG | 56 |
| 2716 | CCGCCTCGCCGCCTGGTTGG | 57 |
| 2717 | CGCCTCGCCGCCTGGTTGGA | 58 |
| 2718 | GCCTCGCCGCCTGGTTGGAG | 59 |
| 2719 | CCTCGCCGCCTGGTTGGAGC | 60 |
| 2720 | CTCGCCGCCTGGTTGGAGCC | 61 |
| 2721 | TCGCCGCCTGGTTGGAGCCT | 62 |
| 2722 | CGCCGCCTGGTTGGAGCCTG | 63 |
| 2723 | GCCGCCTGGTTGGAGCCTGC | 64 |
| 2724 | CCGCCTGGTTGGAGCCTGCT | 65 |
| 2725 | CGCCTGGTTGGAGCCTGCTC | 66 |
| 2726 | CGCTCCCTGGCCCCGCGCGT | 6 |
| 2727 | GCGCTCCCTGGCCCCGCGCG | 5 |
| 2728 | AGCGCTCCCTGGCCCCGCGC | 4 |
| 2729 | TAGCGCTCCCTGGCCCCGCG | 3 |
| 2730 | GTAGCGCTCCCTGGCCCCGC | 2 |
| 2731 | CGTAGCGCTCCCTGGCCCCG | 1 |
| 2732 | CCGCGGCGCAGGGCTGCGCTCCGAG | 85 |
| 2733 | CGCGGCGCAGGGCTGCGCTC | 86 |
| 2734 | GCGGCGCAGGGCTGCGCTCC | 87 |
| 2735 | CGGCGCAGGGCTGCGCTCCG | 88 |
| 2736 | GGCGCAGGGCTGCGCTCCGA | 89 |
| 2737 | GCGCAGGGCTGCGCTCCGAG | 90 |
| 2738 | CGCAGGGCTGCGCTCCGAGG | 91 |
| 2739 | GCAGGGCTGCGCTCCGAGGG | 92 |
| 2740 | CAGGGCTGCGCTCCGAGGGT | 93 |
| 2741 | AGGGCTGCGCTCCGAGGGTC | 94 |
| 2742 | GGGCTGCGCTCCGAGGGTCC | 95 |
| 2743 | GGCTGCGCTCCGAGGGTCCG | 96 |
| 2744 | GCTGCGCTCCGAGGGTCCGC | 97 |
| 2745 | CTGCGCTCCGAGGGTCCGCT | 98 |
| 2746 | TGCGCTCCGAGGGTCCGCTG | 99 |
| 2747 | GCGCTCCGAGGGTCCGCTGG | 100 |
| 2748 | CGCTCCGAGGGTCCGCTGGC | 101 |
| 2749 | GCTCCGAGGGTCCGCTGGCT | 102 |
| 2750 | CTCCGAGGGTCCGCTGGCTC | 103 |
| 2751 | TCCGAGGGTCCGCTGGCTCG | 104 |
| 2752 | CCGAGGGTCCGCTGGCTCGG | 105 |
| 2753 | CGAGGGTCCGCTGGCTCGGT | 106 |
| 2754 | GAGGGTCCGCTGGCTCGGTG | 107 |
| 2755 | AGGGTCCGCTGGCTCGGTGG | 108 |
| 2756 | GGGTCCGCTGGCTCGGTGGC | 109 |
| 2757 | GGTCCGCTGGCTCGGTGGCC | 110 |
| 2758 | GTCCGCTGGCTCGGTGGCCT | 111 |
| 2759 | TCCGCTGGCTCGGTGGCCTG | 112 |
| 2760 | CCGCTGGCTCGGTGGCCTGG | 113 |
| 2761 | CGCTGGCTCGGTGGCCTGGG | 114 |
| 2762 | GCTGGCTCGGTGGCCTGGGG | 115 |
| 2763 | CTGGCTCGGTGGCCTGGGGT | 116 |
| 2764 | TGGCTCGGTGGCCTGGGGTT | 117 |
| 2765 | GGCTCGGTGGCCTGGGGTTT | 118 |
| 2766 | GCTCGGTGGCCTGGGGTTTG | 119 |
| 2767 | CTCGGTGGCCTGGGGTTTGC | 120 |
| 2768 | TCGGTGGCCTGGGGTTTGCC | 121 |
| 2769 | CGGTGGCCTGGGGTTTGCCC | 122 |
| 2770 | GGTGGCCTGGGGTTTGCCCG | 123 |
| 2771 | GTGGCCTGGGGTTTGCCCGG | 124 |
| 2772 | TGGCCTGGGGTTTGCCCGGC | 125 |
| 2773 | GGCCTGGGGTTTGCCCGGCT | 126 |
| 2774 | GCCTGGGGTTTGCCCGGCTC | 127 |
| 2775 | CCTGGGGTTTGCCCGGCTCA | 128 |
| 2776 | CTGGGGTTTGCCCGGCTCAG | 129 |
| 2777 | TGGGGTTTGCCCGGCTCAGC | 130 |
| 2778 | GGGGTTTGCCCGGCTCAGCG | 131 |
| 2779 | GGGTTTGCCCGGCTCAGCGG | 132 |
| 2780 | GGTTTGCCCGGCTCAGCGGC | 133 |
| 2781 | GTTTGCCCGGCTCAGCGGCT | 134 |
| 2782 | TTTGCCCGGCTCAGCGGCTC | 135 |
| 2783 | TTGCCCGGCTCAGCGGCTCA | 136 |
| 2784 | TGCCCGGCTCAGCGGCTCAT | 137 |
| 2785 | GCCCGGCTCAGCGGCTCATG | 138 |
| 2786 | CCCGGCTCAGCGGCTCATGG | 139 |
| 2787 | CCGGCTCAGCGGCTCATGGT | 140 |
| 2788 | CGGCTCAGCGGCTCATGGTC | 141 |
| 2789 | GGCTCAGCGGCTCATGGTCC | 142 |
| 2790 | GCTCAGCGGCTCATGGTCCG | 143 |
| 2791 | CTCAGCGGCTCATGGTCCGG | 144 |
| 2792 | TCAGCGGCTCATGGTCCGGC | 145 |
| 2793 | CAGCGGCTCATGGTCCGGCC | 146 |
| 2794 | AGCGGCTCATGGTCCGGCCC | 147 |
| 2795 | GCGGCTCATGGTCCGGCCCC | 148 |
| 2796 | CGGCTCATGGTCCGGCCCCC | 149 |
| 2797 | GGCTCATGGTCCGGCCCCCG | 150 |
| 2798 | GCTCATGGTCCGGCCCCCGC | 151 |
| 2799 | CTCATGGTCCGGCCCCCGCG | 152 |
| 2800 | TCATGGTCCGGCCCCCGCGC | 153 |
| 2801 | CATGGTCCGGCCCCCGCGCC | 154 |
| 2802 | ATGGTCCGGCCCCCGCGCCC | 155 |
| 2803 | TGGTCCGGCCCCCGCGCCCC | 156 |
| 2804 | GGTCCGGCCCCCGCGCCCCA | 157 |
| 2805 | GTCCGGCCCCCGCGCCCCAG | 158 |
| 2806 | TCCGGCCCCCGCGCCCCAGC | 159 |
| 2807 | CCGGCCCCCGCGCCCCAGCC | 160 |
| 2808 | CGGCCCCCGCGCCCCAGCCC | 161 |
| 2809 | GGCCCCCGCGCCCCAGCCCC | 162 |
| 2810 | GCCCCCGCGCCCCAGCCCCC | 163 |
| 2811 | CCCCCGCGCCCCAGCCCCCG | 164 |
| 2812 | CCCCGCGCCCCAGCCCCCGC | 165 |
| 2813 | CCCGCGCCCCAGCCCCCGCC | 166 |
| 2814 | CCGCGCCCCAGCCCCCGCCG | 167 |
| 2815 | CGCGCCCCAGCCCCCGCCGC | 168 |
| 2816 | GCGCCCCAGCCCCCGCCGCC | 169 |
| 2817 | CGCCCCAGCCCCCGCCGCCG | 170 |
| 2818 | GCCCCAGCCCCCGCCGCCGC | 171 |
| 2819 | CCCCAGCCCCCGCCGCCGCC | 172 |
| 2820 | CCCAGCCCCCGCCGCCGCCG | 173 |
| 2821 | CCAGCCCCCGCCGCCGCCGC | 174 |
| 2822 | CAGCCCCCGCCGCCGCCGCC | 175 |
| 2823 | AGCCCCCGCCGCCGCCGCCG | 176 |
| 2824 | GCCCCCGCCGCCGCCGCCGC | 177 |
| 2825 | CCCCCGCCGCCGCCGCCGCC | 178 |
| 2826 | CCCCGCCGCCGCCGCCGCCG | 179 |
| 2827 | CCCGCCGCCGCCGCCGCCGC | 180 |
| 2828 | CCCCCGCCGCCGCCGCCGCC | 181 |
| 2829 | CCCCGCCGCCGCCGCCGCCG | 182 |
| 2830 | GCCCCCGCCGCCGCCGCCGC | 183 |
| 2831 | CCGCCGCCGCCGCCGCCGCA | 184 |
| 2832 | CGCCGCCGCCGCCGCCGCAG | 185 |
| 2833 | GCCGCCGCCGCCGCCGCAGG | 186 |
| 2834 | CCGCCGCCGCCGCCGCAGGT | 187 |
| 2835 | CGCCGCCGCCGCCGCAGGTC | 188 |
| 2836 | GCCGCCGCCGCCGCAGGTCC | 189 |
| 2837 | CCGCCGCCGCCGCAGGTCCT | 190 |
| 2838 | CGCCGCCGCCGCAGGTCCTG | 191 |
| 2839 | GCCGCCGCCGCAGGTCCTGG | 192 |
| 2840 | CCGCCGCCGCAGGTCCTGGC | 193 |
| 2841 | CGCCGCCGCAGGTCCTGGCA | 194 |
| 2842 | GCCGCCGCAGGTCCTGGCAA | 195 |
| 2843 | CCGCCGCAGGTCCTGGCAAT | 196 |
| 2844 | CGCCGCAGGTCCTGGCAATC | 197 |
| 2845 | GCCGCAGGTCCTGGCAATCC | 198 |
| 2846 | CCGCAGGTCCTGGCAATCCC | 199 |
| 2847 | CGCAGGTCCTGGCAATCCCT | 200 |
| 2848 | TCCGCGGCGCAGGGCTGCGC | 84 |
| 2849 | CTCCGCGGCGCAGGGCTGCG | 83 |
| 2850 | GCTCCGCGGCGCAGGGCTGC | 82 |
| 2851 | TGCTCCGCGGCGCAGGGCTG | 81 |
| 2852 | CTGCTCCGCGGCGCAGGGCT | 80 |
| 2853 | CCTGCTCCGCGGCGCAGGGC | 79 |
| 2854 | GCCTGCTCCGCGGCGCAGGG | 78 |
| 2855 | AGCCTGCTCCGCGGCGCAGG | 77 |
| 2856 | GAGCCTGCTCCGCGGCGCAG | 76 |
| 2857 | GGAGCCTGCTCCGCGGCGCA | 75 |
| 2858 | TGGAGCCTGCTCCGCGGCGC | 74 |
| 2859 | TTGGAGCCTGCTCCGCGGCG | 73 |
| 2860 | GTTGGAGCCTGCTCCGCGGC | 72 |
| 2861 | GGTTGGAGCCTGCTCCGCGG | 71 |
| 2862 | TGGTTGGAGCCTGCTCCGCG | 70 |
| 2863 | CTGGTTGGAGCCTGCTCCGC | 69 |
| 2864 | CCTGGTTGGAGCCTGCTCCG | 68 |
| 2865 | GCCGCCTGCTACTCCTGGCCTC | 453 |
| 2866 | CCGCCTGCTACTCCTGGCCT | 454 |
| 2867 | CGCCTGCTACTCCTGGCCTC | 455 |
| 2868 | GGCCGCCTGCTACTCCTGGC | 452 |
| 2869 | GCGCACTCGGGCCCGCCCCTCTCTGCCC | 361 |
| 2870 | CGCACTCGGGCCCGCCCCTC | 362 |
| 2871 | GCACTCGGGCCCGCCCCTCT | 363 |
| 2872 | CACTCGGGCCCGCCCCTCTC | 364 |
| 2873 | ACTCGGGCCCGCCCCTCTCT | 365 |
| 2874 | CTCGGGCCCGCCCCTCTCTG | 366 |
| 2875 | TCGGGCCCGCCCCTCTCTGC | 367 |
| 2876 | CGGGCCCGCCCCTCTCTGCC | 368 |
| 2877 | GGGCCCGCCCCTCTCTGCCC | 369 |
| 2878 | GGCCCGCCCCTCTCTGCCCC | 370 |
| 2879 | GCCCGCCCCTCTCTGCCCCA | 371 |
| 2880 | CCCGCCCCTCTCTGCCCCAC | 372 |
| 2881 | CCGCCCCTCTCTGCCCCACC | 373 |
| 2882 | CGCCCCTCTCTGCCCCACCC | 374 |
| 2883 | GGCGCACTCGGGCCCGCCCC | 360 |
| 2884 | GGGCGCACTCGGGCCCGCCC | 359 |
| 2885 | GGGGCGCACTCGGGCCCGCC | 358 |
| 2886 | GGGGGCGCACTCGGGCCCGC | 357 |
| 2887 | GGGGGGCGCACTCGGGCCCG | 356 |
| 2888 | CGGGGGGCGCACTCGGGCCC | 355 |
| 2889 | GCGGGGGGCGCACTCGGGCC | 354 |
| 2890 | GGCGGGGGGCGCACTCGGGC | 353 |
| 2891 | CGCTCCGAGGGTCCGCTGGCTCGG | 101 |
| 2892 | GCTCCGAGGGTCCGCTGGCT | 102 |
| 2893 | CTCCGAGGGTCCGCTGGCTC | 103 |
| 2894 | TCCGAGGGTCCGCTGGCTCG | 104 |
| 2895 | CCGAGGGTCCGCTGGCTCGG | 105 |
| 2896 | CGAGGGTCCGCTGGCTCGGT | 106 |
| 2897 | GAGGGTCCGCTGGCTCGGTG | 107 |
| 2898 | AGGGTCCGCTGGCTCGGTGG | 108 |
| 2899 | GGGTCCGCTGGCTCGGTGGC | 109 |
| 2900 | GGTCCGCTGGCTCGGTGGCC | 110 |
| 2901 | GTCCGCTGGCTCGGTGGCCT | 111 |
| 2902 | TCCGCTGGCTCGGTGGCCTG | 112 |
| 2903 | CCGCTGGCTCGGTGGCCTGG | 113 |
| 2904 | CGCTGGCTCGGTGGCCTGGG | 114 |
| 2905 | GCTGGCTCGGTGGCCTGGGG | 115 |
| 2906 | CTGGCTCGGTGGCCTGGGGT | 116 |
| 2907 | TGGCTCGGTGGCCTGGGGTT | 117 |
| 2908 | GGCTCGGTGGCCTGGGGTTT | 118 |
| 2909 | GCTCGGTGGCCTGGGGTTTG | 119 |
| 2910 | CTCGGTGGCCTGGGGTTTGC | 120 |
| 2911 | TCGGTGGCCTGGGGTTTGCC | 121 |
| 2912 | CGGTGGCCTGGGGTTTGCCC | 122 |
| 2913 | GGTGGCCTGGGGTTTGCCCG | 123 |
| 2914 | GTGGCCTGGGGTTTGCCCGG | 124 |
| 2915 | TGGCCTGGGGTTTGCCCGGC | 125 |
| 2916 | GGCCTGGGGTTTGCCCGGCT | 126 |
| 2917 | GCCTGGGGTTTGCCCGGCTC | 127 |
| 2918 | CCTGGGGTTTGCCCGGCTCA | 128 |
| 2919 | CTGGGGTTTGCCCGGCTCAG | 129 |
| 2920 | TGGGGTTTGCCCGGCTCAGC | 130 |
| 2921 | GGGGTTTGCCCGGCTCAGCG | 131 |
| 2922 | GGGTTTGCCCGGCTCAGCGG | 132 |
| 2923 | GGTTTGCCCGGCTCAGCGGC | 133 |
| 2924 | GTTTGCCCGGCTCAGCGGCT | 134 |
| 2925 | TTTGCCCGGCTCAGCGGCTC | 135 |
| 2926 | TTGCCCGGCTCAGCGGCTCA | 136 |
| 2927 | TGCCCGGCTCAGCGGCTCAT | 137 |
| 2928 | GCCCGGCTCAGCGGCTCATG | 138 |
| 2929 | CCCGGCTCAGCGGCTCATGG | 139 |
| 2930 | CCGGCTCAGCGGCTCATGGT | 140 |
| 2931 | CGGCTCAGCGGCTCATGGTC | 141 |
| 2932 | GGCTCAGCGGCTCATGGTCC | 142 |
| 2933 | GCTCAGCGGCTCATGGTCCG | 143 |
| 2934 | CTCAGCGGCTCATGGTCCGG | 144 |
| 2935 | TCAGCGGCTCATGGTCCGGC | 145 |
| 2936 | CAGCGGCTCATGGTCCGGCC | 146 |
| 2937 | AGCGGCTCATGGTCCGGCCC | 147 |
| 2938 | GCGGCTCATGGTCCGGCCCC | 148 |
| 2939 | CGGCTCATGGTCCGGCCCCC | 149 |
| 2940 | GGCTCATGGTCCGGCCCCCG | 150 |
| 2941 | GCTCATGGTCCGGCCCCCGC | 151 |
| 2942 | CTCATGGTCCGGCCCCCGCG | 152 |
| 2943 | TCATGGTCCGGCCCCCGCGC | 153 |
| 2944 | CATGGTCCGGCCCCCGCGCC | 154 |
| 2945 | ATGGTCCGGCCCCCGCGCCC | 155 |
| 2946 | TGGTCCGGCCCCCGCGCCCC | 156 |
| 2947 | GGTCCGGCCCCCGCGCCCCA | 157 |
| 2948 | GTCCGGCCCCCGCGCCCCAG | 158 |
| 2949 | TCCGGCCCCCGCGCCCCAGC | 159 |
| 2950 | CCGGCCCCCGCGCCCCAGCC | 160 |
| 2951 | CGGCCCCCGCGCCCCAGCCC | 161 |
| 2952 | GGCCCCCGCGCCCCAGCCCC | 162 |
| 2953 | GCCCCCGCGCCCCAGCCCCC | 163 |
| 2954 | CCCCCGCGCCCCAGCCCCCG | 164 |
| 2955 | CCCCGCGCCCCAGCCCCCGC | 165 |
| 2956 | CCCGCGCCCCAGCCCCCGCC | 166 |
| 2957 | CCGCGCCCCAGCCCCCGCCG | 167 |
| 2958 | CGCGCCCCAGCCCCCGCCGC | 168 |
| 2959 | GCGCCCCAGCCCCCGCCGCC | 169 |
| 2960 | CGCCCCAGCCCCCGCCGCCG | 170 |
| 2961 | GCCCCAGCCCCCGCCGCCGC | 171 |
| 2962 | CCCCAGCCCCCGCCGCCGCC | 172 |
| 2963 | CCCAGCCCCCGCCGCCGCCG | 173 |
| 2964 | CCAGCCCCCGCCGCCGCCGC | 174 |
| 2965 | CAGCCCCCGCCGCCGCCGCC | 175 |
| 2966 | AGCCCCCGCCGCCGCCGCCG | 176 |
| 2967 | GCCCCCGCCGCCGCCGCCGC | 177 |
| 2968 | CCCCCGCCGCCGCCGCCGCC | 178 |
| 2969 | CCCCGCCGCCGCCGCCGCCG | 179 |
| 2970 | CCCGCCGCCGCCGCCGCCGC | 180 |
| 2971 | CCGCCGCCGCCGCCGCCGCC | 181 |
| 2972 | CGCCGCCGCCGCCGCCGCCG | 182 |
| 2973 | GCCGCCGCCGCCGCCGCCGC | 183 |
| 2974 | CCGCCGCCGCCGCCGCCGCA | 184 |
| 2975 | CGCCGCCGCCGCCGCCGCAG | 185 |
| 2976 | GCCGCCGCCGCCGCCGCAGG | 186 |
| 2977 | CCGCCGCCGCCGCCGCAGGT | 187 |
| 2978 | CGCCGCCGCCGCCGCAGGTC | 188 |
| 2979 | GCCGCCGCCGCCGCAGGTCC | 189 |
| 2980 | CCGCCGCCGCCGCAGGTCCT | 190 |
| 2981 | CGCCGCCGCCGCAGGTCCTG | 191 |
| 2982 | GCCGCCGCCGCAGGTCCTGG | 192 |
| 2983 | CCGCCGCCGCAGGTCCTGGC | 193 |
| 2984 | CGCCGCCGCAGGTCCTGGCA | 194 |
| 2985 | GCCGCCGCAGGTCCTGGCAA | 195 |
| 2986 | CCGCCGCAGGTCCTGGCAAT | 196 |
| 2987 | CGCCGCAGGTCCTGGCAATC | 197 |
| 2988 | GCCGCAGGTCCTGGCAATCC | 198 |
| 2989 | CCGCAGGTCCTGGCAATCCC | 199 |
| 2990 | CGCAGGTCCTGGCAATCCCT | 200 |
| 2991 | GCGCTCCGAGGGTCCGCTGG | 100 |
| 2992 | TGCGCTCCGAGGGTCCGCTG | 99 |
| 2993 | CTGCGCTCCGAGGGTCCGCT | 98 |
| 2994 | GCTGCGCTCCGAGGGTCCGC | 97 |
| 2995 | GGCTGCGCTCCGAGGGTCCG | 96 |
| 2996 | GGGCTGCGCTCCGAGGGTCC | 95 |
| 2997 | AGGGCTGCGCTCCGAGGGTC | 94 |
| 2998 | CAGGGCTGCGCTCCGAGGGT | 93 |
| 2999 | GCAGGGCTGCGCTCCGAGGG | 92 |
| 3000 | CGCAGGGCTGCGCTCCGAGG | 91 |
| 3001 | GCGCAGGGCTGCGCTCCGAG | 90 |
| 3002 | GGCGCAGGGCTGCGCTCCGA | 89 |
| 3003 | CGGCGCAGGGCTGCGCTCCG | 88 |
| 3004 | GCGGCGCAGGGCTGCGCTCC | 87 |
| 3005 | CGCGGCGCAGGGCTGCGCTC | 86 |
| 3006 | CCGCGGCGCAGGGCTGCGCT | 85 |
| 3007 | TCCGCGGCGCAGGGCTGCGC | 84 |
| 3008 | CTCCGCGGCGCAGGGCTGCG | 83 |
| 3009 | GCTCCGCGGCGCAGGGCTGC | 82 |
| 3010 | TGCTCCGCGGCGCAGGGCTG | 81 |
| 3011 | CTGCTCCGCGGCGCAGGGCT | 80 |
| 3012 | CCTGCTCCGCGGCGCAGGGC | 79 |
| 3013 | GCCTGCTCCGCGGCGCAGGG | 78 |
| 3014 | AGCCTGCTCCGCGGCGCAGG | 77 |
| 3015 | GAGCCTGCTCCGCGGCGCAG | 76 |
| 3016 | GGAGCCTGCTCCGCGGCGCA | 75 |
| 3017 | TGGAGCCTGCTCCGCGGCGC | 74 |
| 3018 | TTGGAGCCTGCTCCGCGGCG | 73 |
| 3019 | GTTGGAGCCTGCTCCGCGGC | 72 |
| 3020 | GGTTGGAGCCTGCTCCGCGG | 71 |
| 3021 | TGGTTGGAGCCTGCTCCGCG | 70 |
| 3022 | CTGGTTGGAGCCTGCTCCGC | 69 |
| 3023 | CCTGGTTGGAGCCTGCTCCG | 68 |
| 3024 | GTCCACCCTCAGTGCACGACCTCGT | 478 |
| 3025 | TCCACCCTCAGTGCACGACC | 479 |
| 3026 | CCACCCTCAGTGCACGACCT | 480 |
| 3027 | CACCCTCAGTGCACGACCTC | 481 |
| 3028 | ACCCTCAGTGCACGACCTCG | 482 |
| 3029 | CCCTCAGTGCACGACCTCGT | 483 |
| 3030 | CCTCAGTGCACGACCTCGTC | 484 |
| 3031 | CTCAGTGCACGACCTCGTCA | 485 |
| 3032 | TCAGTGCACGACCTCGTCAC | 486 |
| 3033 | CAGTGCACGACCTCGTCACC | 487 |
| 3034 | AGTGCACGACCTCGTCACCC | 488 |
| 3035 | GTGCACGACCTCGTCACCCC | 489 |
| 3036 | TGCACGACCTCGTCACCCCA | 490 |
| 3037 | GCACGACCTCGTCACCCCAC | 491 |
| 3038 | CACGACCTCGTCACCCCACT | 492 |
| 3039 | ACGACCTCGTCACCCCACTT | 493 |
| 3040 | CGACCTCGTCACCCCACTTG | 494 |
| 3041 | GACCTCGTCACCCCACTTGC | 495 |
| 3042 | ACCTCGTCACCCCACTTGCC | 496 |
| 3043 | CCTCGTCACCCCACTTGCCT | 497 |
| 3044 | CTCGTCACCCCACTTGCCTC | 498 |
| 3045 | TCGTCACCCCACTTGCCTCT | 499 |
| 3046 | CGTCACCCCACTTGCCTCTC | 500 |
| 3047 | CGTCCACCCTCAGTGCACGA | 477 |
| 3048 | ACGTCCACCCTCAGTGCACG | 476 |
| 3049 | TACGTCCACCCTCAGTGCAC | 475 |
| 3050 | CTACGTCCACCCTCAGTGCA | 474 |
| 3051 | TCTACGTCCACCCTCAGTGC | 473 |
| 3052 | CTCTACGTCCACCCTCAGTG | 472 |
| 3053 | CCTCTACGTCCACCCTCAGT | 471 |
| 3054 | GCCTCTACGTCCACCCTCAG | 470 |
| 3055 | GGCCTCTACGTCCACCCTCA | 469 |
| 3056 | TGGCCTCTACGTCCACCCTC | 468 |
| 3057 | CTGGCCTCTACGTCCACCCT | 467 |
| 3058 | CCTGGCCTCTACGTCCACCC | 466 |
| 3059 | TCCTGGCCTCTACGTCCACC | 465 |
| 3060 | CTCCTGGCCTCTACGTCCAC | 464 |
| 3061 | ACTCCTGGCCTCTACGTCCA | 463 |
| 3062 | TACTCCTGGCCTCTACGTCC | 462 |
| 3063 | CTACTCCTGGCCTCTACGTC | 461 |
| 3064 | GCTACTCCTGGCCTCTACGT | 460 |
| 3065 | TGCTACTCCTGGCCTCTACG | 459 |
| 3066 | CACCGCCTGAGGAAGTCTGGATGC | 256 |
| 3067 | ACCGCCTGAGGAAGTCTGGA | 257 |
| 3068 | CCGCCTGAGGAAGTCTGGAT | 258 |
| 3069 | CGCCTGAGGAAGTCTGGATG | 259 |
| 3070 | CCACCGCCTGAGGAAGTCTG | 255 |
| 3071 | GCCACCGCCTGAGGAAGTCT | 254 |
| 3072 | AGCCACCGCCTGAGGAAGTC | 253 |
| 3073 | CAGCCACCGCCTGAGGAAGT | 252 |
| 3074 | CCAGCCACCGCCTGAGGAAG | 251 |
| 3075 | TCCAGCCACCGCCTGAGGAA | 250 |
| 3076 | CTCCAGCCACCGCCTGAGGA | 249 |
| 3077 | CCTCCAGCCACCGCCTGAGG | 248 |
| 3078 | GCCTCCAGCCACCGCCTGAG | 247 |
| 3079 | AGCCTCCAGCCACCGCCTGA | 246 |
| 3080 | CAGCCTCCAGCCACCGCCTG | 245 |
| 3081 | GCAGCCTCCAGCCACCGCCT | 244 |
| 3082 | CGCAGCCTCCAGCCACCGCC | 243 |
| 3083 | GCGCAGCCTCCAGCCACCGC | 242 |
| 3084 | TGCGCAGCCTCCAGCCACCG | 241 |
| 3085 | ATGCGCAGCCTCCAGCCACC | 240 |
| 3086 | GATGCGCAGCCTCCAGCCAC | 239 |
| 3087 | AGATGCGCAGCCTCCAGCCA | 238 |
| 3088 | CAGATGCGCAGCCTCCAGCC | 237 |
| 3089 | CCAGATGCGCAGCCTCCAGC | 236 |
| 3090 | CCCAGATGCGCAGCCTCCAG | 235 |
| 3091 | CCCCAGATGCGCAGCCTCCA | 234 |
| 3092 | GCCCCAGATGCGCAGCCTCC | 233 |
| 3093 | AGCCCCAGATGCGCAGCCTC | 232 |
| 3094 | AAGCCCCAGATGCGCAGCCT | 231 |
| 3095 | AAAGCCCCAGATGCGCAGCC | 230 |
| 3096 | TAAAGCCCCAGATGCGCAGC | 229 |
| 3097 | TTAAAGCCCCAGATGCGCAG | 228 |
| 3098 | TTTAAAGCCCCAGATGCGCA | 227 |
| 3099 | GTTTAAAGCCCCAGATGCGC | 226 |
| 3100 | TGTTTAAAGCCCCAGATGCG | 225 |
| 3101 | TGCCTCTCTCGCGATCTGGGCG | 512 |
| 3102 | GCCTCTCTCGCGATCTGGGC | 513 |
| 3103 | CCTCTCTCGCGATCTGGGCG | 514 |
| 3104 | CTCTCTCGCGATCTGGGCGC | 515 |
| 3105 | TCTCTCGCGATCTGGGCGCA | 516 |
| 3106 | CTCTCGCGATCTGGGCGCAC | 517 |
| 3107 | TCTCGCGATCTGGGCGCACA | 518 |
| 3108 | CTCGCGATCTGGGCGCACAG | 519 |
| 3109 | TCGCGATCTGGGCGCACAGC | 520 |
| 3110 | CGCGATCTGGGCGCACAGCC | 521 |
| 3111 | GCGATCTGGGCGCACAGCCT | 522 |
| 3112 | CGATCTGGGCGCACAGCCTC | 523 |
| 3113 | GATCTGGGCGCACAGCCTCA | 524 |
| 3114 | ATCTGGGCGCACAGCCTCAG | 525 |
| 3115 | TCTGGGCGCACAGCCTCAGA | 526 |
| 3116 | CTGGGCGCACAGCCTCAGAA | 527 |
| 3117 | TGGGCGCACAGCCTCAGAAC | 528 |
| 3118 | GGGCGCACAGCCTCAGAACC | 529 |
| 3119 | GGCGCACAGCCTCAGAACCC | 530 |
| 3120 | GCGCACAGCCTCAGAACCCC | 531 |
| 3121 | CGCACAGCCTCAGAACCCCC | 532 |
| 3122 | TTGCCTCTCTCGCGATCTGG | 511 |
| 3123 | CTTGCCTCTCTCGCGATCTG | 510 |
| 3124 | ACTTGCCTCTCTCGCGATCT | 509 |
| 3125 | CACTTGCCTCTCTCGCGATC | 508 |
| 3126 | CCACTTGCCTCTCTCGCGAT | 507 |
| 3127 | CCCACTTGCCTCTCTCGCGA | 506 |
| 3128 | CCCCACTTGCCTCTCTCGCG | 505 |
| 3129 | ACCCCACTTGCCTCTCTCGC | 504 |
| 3130 | CACCCCACTTGCCTCTCTCG | 503 |
| 3131 | GAGGGACGCCGGCTTGGCTAGGAC | 618 |
| 3132 | AGGGACGCCGGCTTGGCTAG | 619 |
| 3133 | GGGACGCCGGCTTGGCTAGG | 620 |
| 3134 | GGACGCCGGCTTGGCTAGGA | 621 |
| 3135 | GACGCCGGCTTGGCTAGGAC | 622 |
| 3136 | ACGCCGGCTTGGCTAGGACA | 623 |
| 3137 | CGCCGGCTTGGCTAGGACAC | 624 |
| 3138 | GCCGGCTTGGCTAGGACACC | 625 |
| 3139 | CCGGCTTGGCTAGGACACCC | 626 |
| 3140 | CGGCTTGGCTAGGACACCCT | 627 |
| 3141 | GGAGGGACGCCGGCTTGGCT | 617 |
| 3142 | AGGAGGGACGCCGGCTTGGC | 616 |
| 3143 | TAGGAGGGACGCCGGCTTGG | 615 |
| 3144 | CTAGGAGGGACGCCGGCTTG | 614 |
| 3145 | ACTAGGAGGGACGCCGGCTT | 613 |
| 3146 | TACTAGGAGGGACGCCGGCT | 612 |
| 3147 | CTACTAGGAGGGACGCCGGC | 611 |
| 3148 | ACTACTAGGAGGGACGCCGG | 610 |
| 3149 | TACTACTAGGAGGGACGCCG | 609 |
| 3150 | GTACTACTAGGAGGGACGCC | 608 |
| 3151 | GGTACTACTAGGAGGGACGC | 607 |
| 3152 | CGGTACTACTAGGAGGGACG | 606 |
| 3153 | GCGGTACTACTAGGAGGGAC | 605 |

Hot Zones (Relative upstream location to gene start site)
1-1100
1250-3050
3950-4250

### Examples

Genetic Code (5′ Upstream Region)
(SEQ ID NO: 11960)
TAAGCTTGCTTGACGCAGGGTAGTCACAAACCTTCAATTTGCAAAAT
TGCTATCTCTGCACAGCACAGTAGGGCAAAGTGTGAATAAAATGAGGTAA
CCTGTACCTCCAGCTAAAGTCCCAGAATTAACTTTCCTTGGCTCCAGTGG
ATTCACAAGCCGGTATCTGAATCATCACCTCACCAAGATGCCTGGATCTG
CCTTTTAGCCCAGCTTGGGTCACATTGCCACTGTGGAGCCAGGAGGTGGG
TCACATCTGCTGAATTCAGACCTAGAGTTGGGGAGAAGTAGCTTCCCAAT
GGGAAACTAAGGGGCAGCTACTAAAAGTAGGAGGACAGGGTCTTGGGAAG
GCTTACATGGCACACGGCCACTACCTCCCTCAATGCTCTGTCCCCTGCTT
AGTGTCCCGCACTGTAATTTCTGCCTCTTCATCAATAAAACACCACCTTA
ATGCCACTGTACCCCAGCACCAAAAACAGTGTTCATCAAAAACTTCCCGA
ATAAATGACAGAATTCATGTCATATCGCGACGTCTTCTAATCACAGCCTG
CGTAGTTTTCTGGGGCTGCTGTAAAAAAGCACTACAGACTGGGTGGCTTA
CAACAGAAATTTATTCTCTCAGAGCTCTGAGACTAGAAGTCCAAAACCAA
CATGTCAGCAGGGCCACGCTCCCTCTGAAGCCTCTGGGGGAAGAATTCCT
TCTTGTCTCTTCTAGCTTCTGGGTTGCAGGCAACTCCTTGGGTTGCAGGC
ATTGCTCCAATTTCTGCCTCCATGGTCACATGGAGTTCTTCTTGCTGTGT
GTCTCTGTGTCCAAAGTTTTGTCTTCTTATCATGACAACAGGCTTTGGAT
TAGAGCCCACTCATCTTAACTTGATTGTATCTGCAAAGACCCTATTTCCA
TGTGAGGGCACAGTCACAGGCATTGGGACTTGAACATATCTTTTTGGCAA
CACAATTATATCCACTAAACAGCATTTTTGCATCTATATTAAGAATGACT
AAAAGATGCTGCAGTAACAAACATATCCCAAAAGCTCCATGGTTCGTTGC
CTAAGAGTTTGTTTTTCACTTACGAAGTCTGTAGTGGGTCTGGTTGCTTT
CATTTTACGACTTTGCTAGATCAACACAGGGCTCCCAGGGTTACCGTGGC
AGGGGAAGAGAGATATACAGGAGTGCACAGGGGCCCTGGAGCATATTGCA
TGTGCTCACCAACAAGCCCATTATCATCAGATACTGCCTGTTCTCTCCTC
GTCCCCTGGGCCATTCTAGGCCCCAAGTGAGGGTTCTTGGATCTCACACA
AGAAGGAATTTGAGGCAAGTCCATAAAGTGAAAGCAAGTTTATTAAGAAA
GTAAGGGAATAAAAGAATGGCTATTTCATCGGCAGATCAGCCCCAAAAGC
TGCTGGTTGCCCATTTTTATGGTTATTTCTTGATTATATGCTAAACAAGG
GGTAAATTATTCATGCTTCTGCCTTTTAGGCCGTATAGGATAACTTCCTG
ACGTTGCCATGGCATATGTAAACAGTCGTGGCGCTGGTGGGAGTGTGGCA
GTAAGGCTGACCAGAGGTTTTTCTCATCATCATCTTGGTTTTGGTGGGTC
TTGGCCAGCTTCTTTACTGCAACCTGTTTTATCAGCAAGGTCTTTATGAC
CTGTATCTTGTGCCAGCCTCCTATCTCATTTCGTGATTAGGATTGCCTTA
ATTTACTGGTAATGCAGGCCAGCAGGTCTTAGTCTAACCCCTATTCAAGA
TGGAGTTGCTCTGGTTCCAATGCCTCTGACATAGTCATTGCTGGGCACAG
AAGCCTCTCTCTCACTGAGTGCTGCTTCTGCAGCCATTGCCATCTCTGAA
TGGGCACCAAGCCCCACACTGGAAACCGATACCCTTGGAATGCCAAAACC
ACAGAGGCTGTGAAGAGGTACAGTCAAAGCTGCCCTCTGCCAGAGGAGCT
CCAAAGCATGTTATGCAGACTCCAGAGACTTTCTGAAAAGGTTAAAACTC
AAATTGGGCAAGTGTAAATGAACAACACCTAGTGAAGGGAGTCACATACA
AGGCAATACAATAGAGAGTGGTGAGGACTGTGGCAAACCAAAGTATGTGC
CTCATCTAAAGGGAGCAGTCACTACTCAACTTCAGCAAATTATTGCCATA
TGGAAACTGGCATCCAGTATTGCCAGATTTTTGGGAAATTTTTTTAAAAA
AAGAAAACCAGAAAGTCAGATTTTTACATGAAGTTTCCCAAATTTCAAAA
TGCTGTTCAGGCTGGATTTAGCCCACAGGCCACGAGTTTGCAGCCCCTGC
TTTAGTGAGATAACTTTTTCCATTTTCACTCTCAGCTCTCAGCTCTCCAA
CTTGGCTCTCTGGCTATCCACAGGACGTGGACATGAGCCCAGTGGGGCTG
GGCCAGGAGGCAATCCCCCTTCCCAACTGACCTCAGTCTCGCCCTCTCCA
AAACAGCCAAGGTTTGTCACTGGGTCAGGCTGAAGGGCCTGGCTCCCTCC
TGCGGGGCAAGGTCCCTCCCAAGAGGGTCCTTTAAAACTGACTCTGGAAA
GTCAGAGCACACACCCACCAGACAAGCCTGAACTTGTCTGAAGCCCACTG
AGACCCAAGCCGCAGAGACTTTTCTAGCTGTGATGATCAAGACATAATCG
TGACCTCCAATGCCCCCCACAAGTATATTGCTCCTGATTCTTTCAGCCCC
TGACCTTACTTCTCAAACTGTTCCCTGCTGACCCCCAGTCCTATCTGCCC
CCTTCCTAGGCTGGTCCTTACTGACCCCTCCAGCTCCATCCCCTCACCCT
GTGCCCCACCTTTTTCAGATAGAAAAAACTTTCTTCTCCAGTGCCTCTTG
CTGTTTTTCATCTCTGGGCCATTGTCAATGTTCCCTAAAACATTCCCCAT
ATTCCCCACCCAGCACTCCACCTCTTTAGCTCTTCAGGTCTCAGCTCAGA
AGTCACTTCTTCCAGGAAGCCTTCCTTGATTGTCTTTACTAGTTTAGGGG
CTGAAGTCAGGCGTTCCCAACAGCCTGCTGGAGTTCCCCATCACAGCTTA
TCTCTCAACTGTCTTTCCTGAGAGAGGGAGAAGACATTCCTCAGAGACGG
TTGTCACAGGGAGAACTTCAAAATTGGGATTCGACCTGAGAGGCCACATG
GATTCTTGGCTTGGCGCAGGAAAGGATTCAAGAGTGAGTGGGGAATTCGT
GGAACTGAGGGCTCCTCCCCTTTTTAGACCATATAGGGTAAACCTCCCCA
CATTGCCATGGCATTTATAAACTGCCATGGCACTGGTGGGTGCTTCCTTT
AACATGCTAATGCATTATAATTAGCGTAAAATGAGCAGTGAGGATGACCA
GAGGTCGCTTTCTTTGCCATCTTGGTTTTGGCTGGCTTCTTCACTGCATA
CTGTTTTATCAGTGGGGTCTTTGTGACCTCTATCTTATTAAACCAGTCTT
GCCCAATTTCTATCTCATCCTGTGACCGAGAATGCGGACCCTCCTGGGAG
TGCAGCCCAGCAGGTCTCAGCCTCATTTTACCCAGCCCCCTGTTCAAGAT
GGAGTCGCTCTGGTTCCAACGTCTCTAACGCGGGGCCCCTGACTGCTCTA
TTTCCCAAGGTGTATCTAGCATCTCGCACTATACGAGGCCAAGTTAAGGC
TTACACATTTGCAGAAGGAAAGAGGTAAGGAAGCAACCTGGGACCTTCCA
CTGTCTCTGTTTCCATCTCTCTCTTTCCATCTCTGTTCATCCCAGAATCT
CTCTGTCCCTATCCCTAAATATCGAAAATTTCTGTCTCTGACCATCTATC
ATTGTGGCTGATCATCTGTTTCTGACCATTCCTTCCCGTTCCTGACCCCA
GGGAGTGCAGGGTGTCCTAGCCAAGCCGGCGTCCCTCCTAGTAGTACCGC
TGCTCTCTAACCTCAGGACGTCAAGGGCCTAGAGCGACAGATGTTTCCCA
GCAGGGGGTTCTGAGGCTGTGCGCCCAGATCGCGAGAGAGGCAAGTGGGG
TGACGAGGTCGTGCACTGAGGGTGGACGTAGAGGCCAGGAGTAGCAGGCG
GCCGGGGAAAAGAGGTGGAGAAAGGAAAAAAGAGGAGAAAAGTGGAGGAG
GGCGAGTAGGGGGGTGGGGCAGAGAGGGGCGGGCCCGAGTGCGCCCCCCG
CCCCCAGCCCCGCTCTGCCAGCTCCCTCCCAGCCCAGCCGGCTACATCTG
GCGGCTGCCCTCCCTTGTTTCCGCTGCATCCAGACTTCCTCAGGCGGTGG
CTGGAGGCTGCGCATCTGGGGCTTTAAACATACAAAGGGATTGCCAGGAC
CTGCGGCGGCGGCGGCGGCGGCGGGGGCTGGGGCGCGGGGGCCGGACCAT
GAGCCGCTGAGCCGGGCAAACCCCAGGCCACCGAGCCAGCGGACCCTCGG
AGCGCAGCCCTGCGCCGCGGAGCAGGCTCCAACCAGGCGGCGAGGCGGCC
ACACGCACCGAGCCAGCGACCCCCGGGCGACGCGCGGGGCCAGGGAGCGC
TACGATG

[0342] 12) FAP. Fibroblast activation protein, alpha (FAP) also known as seprase or 170 kDa melanoma membrane-bound gelatinase is a protein that in humans is encoded by the FAP gene. FAP is a homodimeric integral membrane gelatinase belonging to the serine protease family with dipeptidyl peptidase IV (DPPIV)-like fold, featuring an alpha/beta-hydrolase domain and an eight-bladed beta-propeller domain. FAP has been found to be overexpressed in stromal fibroblasts of solid tumors and epithelial cancers, granulation tissue of healing wounds, and malignant cells of bone and soft tissue sarcomas. This protein is thought to be involved in the control of fibroblast growth or epithelial-mesenchymal interactions during development, tissue repair, and epithelial carcinogenesis (reviewed by Chiri and Charugi, Am J Cancer Res 2011; 1(4):482-497). FAP expression is seen on activated stromal fibroblasts of more than 90% of all human carcinomas. Stromal fibroblasts play an important role in the development, growth and metastasis of carcinomas. It has been shown that targeting FAP inhibits stromagenesis and growth of tumor in mice. Sibrotuzumab a monoclonal antibody and small molecules against FAP are being developed (Edosada et al., J. Biol. Chem. 2006: 281, 7437-7444).

[0343] Protein: FAP Gene: FAP (Homo sapiens, chromosome 2, 163027200-163100045 [NCBI Reference Sequence: NC_{—}000002.11]; start site location: 163099837; strand: negative)

Gene Identification

| | |
|---|---|
| GeneID | 2191 |
| HGNC | 3590 |
| HPRD | 02674 |
| MIM | 600403 |

Targeted Sequences

| | | Relative upstream |
|---|---|---|
| Sequence | | location |
| ID No: | Sequence (5′-3′) | to gene start site |
| 3154 | CAGAGCGTGGGTCACTGGATCT | 39 |
| 3171 | CACCAACATCTGCTTACGTTGAC | 272 |
| 3177 | TCCACGGACTTTTGAATACCGTGC | 133 |

Target Shift Sequences

| | | Relative upstream |
|---|---|---|
| Sequence | | location |
| ID No: | Sequence (5′-3′) | to gene start site |
| 3154 | CAGAGCGTGGGTCACTGGATCT | 39 |
| 3155 | AGAGCGTGGGTCACTGGATC | 40 |
| 3156 | GAGCGTGGGTCACTGGATCT | 41 |
| 3157 | AGCGTGGGTCACTGGATCTG | 42 |
| 3158 | GCGTGGGTCACTGGATCTGT | 43 |
| 3159 | CGTGGGTCACTGGATCTGTG | 44 |
| 3160 | TCAGAGCGTGGGTCACTGGA | 38 |
| 3161 | TTCAGAGCGTGGGTCACTGG | 37 |
| 3162 | CTTCAGAGCGTGGGTCACTG | 36 |
| 3163 | TCTTCAGAGCGTGGGTCACT | 35 |
| 3164 | GTCTTCAGAGCGTGGGTCAC | 34 |
| 3165 | TGTCTTCAGAGCGTGGGTCA | 33 |
| 3166 | CTGTCTTCAGAGCGTGGGTC | 32 |
| 3167 | TCTGTCTTCAGAGCGTGGGT | 31 |
| 3168 | TTCTGTCTTCAGAGCGTGGG | 30 |
| 3169 | ATTCTGTCTTCAGAGCGTGG | 29 |
| 3170 | AATTCTGTCTTCAGAGCGTG | 28 |
| 3171 | CACCAACATCTGCTTACGTTGAC | 272 |
| 3172 | ACCAACATCTGCTTACGTTG | 273 |
| 3173 | CCAACATCTGCTTACGTTGA | 274 |
| 3174 | CAACATCTGCTTACGTTGAC | 275 |
| 3175 | ACACCAACATCTGCTTACGT | 271 |
| 3176 | TACACCAACATCTGCTTACG | 270 |
| 3177 | TCCACGGACTTTTGAATACCGTGC | 133 |
| 3178 | CCACGGACTTTTGAATACCG | 134 |
| 3179 | CACGGACTTTTGAATACCGT | 135 |
| 3180 | ACGGACTTTTGAATACCGTG | 136 |
| 3181 | CGGACTTTTGAATACCGTGC | 137 |
| 3182 | GGACTTTTGAATACCGTGCC | 138 |
| 3183 | GACTTTTGAATACCGTGCCA | 139 |

Hot Zones (Relative upstream location to gene start site)
1-400

### Examples

Genetic Code (5′ Upstream Region)
(SEQ ID NO: 11961)
TACCACTCAAAAGTTATGGGACTTTGGGGAAGTTATTTAGATTTTGT
GTGCATCCATGTCCTCATCTGTAAAATGAGGATAATAATAGTACGAATGT
TCTGGGGATAAAAGGAGATAGCACGTGCAAGTGCTGAGAAAAAAACGTCA
TGATCAATAAGAGTATTCAATAGACATGAACTAGTAGTAGTAATATTCTC
TAATCTAAAAATGCTAGTGAAAAAACAATATGTGTTAACAAGTTATGTTA
GTCTATAGGTGCTTACACATTCTATTTATACTATTTAAACAGTCTTCTTG
TTGGTTAACCACTTCTAAAAAGATGTAGTATTTCCCTATTTAAATGACAA
TGAAGCACTGATTTATCTTCTGAGTCTTTGTGTCCTCAGCACTCAAAGAA
ATGGGTTGTGTCTCTGTTCTGTTTCTTTTCTAACCCCATTTTGATAGTTA
ACCCTTTGGGTCTCCAAGGAGCACTTGCCCTAATTATGATAGGATAATGA
AACACTGACATCTAATTATAACATTTATGAAGGTAGTAGATGCCAATTAC
AAACTAGGAGGCATGTGGCTTTATATTCTTCCTTATGTAACAATTGTGGT
TTTAGAAAAGAGATCAGATTCAAAAAATAGTTTGAGCTATATCATTTCCC
ACTGATGCTATATTATGCCACTTCTTCCAGATCTATAACTATGTGATAGT
TATTTTGAGCTTTGAAGACCTCAGGACTCTTTCTAGCTTGGAACTCAAAA
ATCTCTTTGACGATGGGTATTTTGTTGAATCCTTTCATTTAAGCAAGTCC
CTGGAGGAAGAGCTTTTAACCCAGGCACTATATAAATAATCATCGGATTA
ATAGACCCCGATTAAAAAAAAACTGTAAACAAATTAATATTTTGAACACA
GTCCTTGTAGAGTGAAATTGTGTTCTTTTGAGATATGTGTAACAAAGTAC
TTTGAGGATGTGAACATCATTAATATTTTAGCCTTAATTATTTTACCCTC
ACAACCTTAAGTGTCCCCCAACAGCAAATCAGTGAAATGTCAATTATAAT
TTTAAAAAAAATTTATCACTTTGGAATAAAACTTTAGGAAGTATCACAAA
GAAGCAATGTAAGGTGGTAACACTGGGTCCTGTTAAAATCTTGGGCAAGT
TATCCAGTTTTTCTAGGCTGTTTCCTAATCATCAAAATGAGTTTTGGTAT
GGATCAGATGAAATAATGCATTAAAATCACTTTGTAGATAACAGTAAACA
ATAAATGTTTATTGAATCTGAGGAATCAAATGGGTAGGATGTTAGGAGCT
GTTAGGCTCTCTAGAAGCAAATTTTTACTTTAAAGAGTATAAAATCAGGC
TTATGTTTACTGCACTTGTATCCTTATTCCCCTTGTAACTTGTCCTTAAA
TAATTTGTCATGGCTTTTGGTTAATAAACACATCTCTCTTTCATCTCCCC
ACCATAAAATAAAAAGATAACATCCTTATGCTCTCAGCATGGTCTTACCT
TCAGACTCTAGAAATACATAGCTGGATGTGTTTTCTGGGAAAACATATAA
ATTAAAATCATTTTTGGCAGGTAAACATTGGCTACTAATAAATAGTTCTA
GTAAGCTCTCCTCCTTATAACCTAAGGATTTATGTTATAGCTCACTTATC
CAGTGGGCTTACCAGAATGCAGTCATATTCCAAAGTCAGCCTTACAAGGT
CCCTCTCTGGAAAGAACTCAGTTGATGAGCCTCTACTCTCCTAATTGCTG
CCCTTACATTTTTACATGACAAATCATCATCCTTTCTGGTTTTGCAGCAT
TTTAATAGACCCAGAGTTGCTTTCTGAGAAAAGTCTCAGTACTAACAAAG
GTTAGAACTAACAAAGGTTGAACTAAGGATGACATGCATGTGGTATGTGC
CCTTTCCAGTCCTCTTCCCAGGTCCATGAAGAAATCACCAACCAGTGAGA
ACACTCTTTCTACAGAACACAAACTCAGCTTCAGGCTATTTCTGAACAAG
AGCTTTAGGAAGCAAAAGGAAACAAGTATGTAAGAACATTAAGAACATAC
CTGCCATACTTATACTAGAATGTAAGTTCCTTAAGGGCACAGACTGTGTC
TGATTCATTTTTGTTTTCTCAACAAAAATGTTGATGGGGTGTTAACTAAT
TGTATAAAGTAGGAATAAGAGTCAGTTTCGTAAATGTTTTTTAAAAGTTG
ACAAAAGTATTTTCATTTTGATTCCAAAATTAAAAAAAGCTAATAAAGAT
ATTACAATATTTTAAAAATCCAAATTTTATGAGAGTTCTTGTCTGGATGA
AAATTAGAATACATTCACATTATCTCAAACGAATGAACATGTGTGACTTT
ATAAAAACAATACCTCCCTAAACCATGAATTCAGATGGAAAAACTCGACA
TCTTTATTTCTGCAGTCAGTCTCATTTTTCTTAAAACAGTTCAAACTAGT
AAGAATTTTCCAGAAGTTACAGCTTGACTCACCCAACCTTCCAAGGAAAA
AACAAAAAAACTTAAACAGACATTGTTTCACTCTCATCATTTCCCACCCT
TACTAATAGTGGCAACTTAAGTGTATCTTAAAGCACTCCAACCTCTTCAT
AGAGCCTATTAAATGAGTATCTTGTGGACACCCACACACAGTCATAGAAT
CCTAAGTGGTGCTCAGACCAGTCACATGTCAGTGCATTCTTAATTGCTAG
AGCTAACATGCTCTCAGCATGGTCTTTTAATTACACCCTAATAATTTATT
ATAGTTTCTCTCTACAATGTAAAGTCTTGGAAATCACCCACTAAAAAGTG
CCTGTGTACTCTGGGGCTTTGGCAGGCTAGGGCAGAACTTCTGAGAACAC
GGTGTGTTCCAGAGAAGACAATCAATCTGAGAGGACTTACACAGAAACAG
TTCATTCAGGACCTGGCTGCTGGCTTTTATCTGAGATCTGAGGATTTCAC
AATCACTTGGAGATACCTACAAGTGTATAGCACACCTTGGATATTACTCT
TAATGATTACTTCATTTTGTAAAGAGGTGACTCCACCAACAGCAAAGGAG
AGGGCCCAGCCCCAGCCACCAGGAATACAGTTCTCTGCCAGTAAGTGCCT
AATGACTCATTTTCCTCAACAGAATTTTCATAAGGCTGGAATTCAGGGAG
GGATGTCTGGAGAATGTCTGAAAGGAAGTTCACAAGCCACTGTCCTGCTC
TTTGCTGGAGAAAGTGTCCCGTGGTAGCCAGAGAAGTTGACTAAGGCAAA
CAGCAACATGTTTTGGTAACATTTCCCCATTACCTTTCATGTACAATCCA
AGAAAGGTTGCCATGAAGTGTTTTAATCAGGTTGGGAACATTATAAACTT
CGAAAAAAGAAAACCATTAGTGGAAAAATTAAGGACACAGTAGATTTAAC
AACTGTGTTTACGTGGAACCACAAAATCTATCCAAGTGAATTGCATTAAA
ACAGACAGAACACTCCAAGAAACTGTTGTATGTGTATTTTTTTTAATTCA
GTCAACCATTTTACTAATCTGTCAAGATGACCAATTTCTTTGGAATTATG
TAGATTTAGCCAAAATGAAATTATACATAAGATTTACTTTTCTTTTCAGA
TGCTTTTTTATTTATTTTTAAATCTTTATAATTACTAGATGTTCTCCTCT
CTCAGAAGATATTCTGAGAGGAAAGCAAAAATACCACTCTTGTAAAGCCA
TTTCCATTCTTCCAAAGGTCTGCTGGTAAATTATTCTTACTGATCTTTCC
ATCTTTCTAGCCTGTGCATACACACCTAACCCATACTAAATTTCACCAGA
TGGCATTTTATTTCTTTAAAGTAAAGCAGCCGTGGGTTTAGACAGTTGAA
TTTTTAAACTTCTGTATTTACTGAAAGTGCATATGGTGCTATATGGACAA
AGAAATTGTGCTGAAAGAAAAACATTTCTGTCTGCAATACCTCATAATCT
TCCAGAGGAAAAAAAAGTGCAGTTATATGGCACATTTCTCACAAAATCTT
ATGTGGCTTCAATGTTCTTCCTCTGTTAAAAAGTAGATATATGTTTAATG
TACAGACCTGCAAGTTTCATTATTTTAAATTCATCTTTTAGTGGCAAATA
AAAATGTTATGCAAAACCCAATGACTTGCTAAAGTGATCCTTCAGTGAAT
TCTAGAAGAAAATGCAACATAAACCTGAACTGGTAAAAAAGAAAAAATAA
AAACCTCTGTATGTCAACGTAAGCAGATGTTGGTGTAGTTACAAGGATGA
GAAGGCTATAAAACTTCCCTTGAGTCACTCACAGTTCATTTGAGGGCCAA
GAACGCCCCCAAAATCTGTTTCTAATTTTACAGAAATCTTTTGAAACTTG
GCACGGTATTCAAAAGTCCGTGGAAAGAAAAAAACCTTGTCCTGGCTTCA
GCTTCCAACTACAAAGACAGACTTGGTCCTTTTCAACGGTTTTCACAGAT
CCAGTGACCCACGCTCTGAAGACAGAATTAGCTAACTTTCAAAAACATCT
GGAAAAATG

[0345] 13) P-Selectin. P-selectin is a protein that in humans is encoded by the SELP gene. P-selectin functions as a cell adhesion molecule (CAM) on the surfaces of activated endothelial cells that line the inner surface of blood vessels and activated platelets. In unactivated endothelial cells, it is stored in granules called Weibel-Palade bodies, and α-granules in unactivated platelets (McEver et al., 1989, J. Clin. Invest. 84 (1): 92-9). P-selectin is located on chromosome 1q21-q24, spans>50 kb and contains 17 exons in human. P-selectin is constitutively expressed on megakaryocytes (the precursor of platelets) and endothelial cells (Pan and McEver, 1998; J. Biol. Chem. 273 (16): 10058-67). The expression of P-selectin consists of two distinct mechanisms. One involves P-selectin synthesis by megakaryocytes and endothelial cells, and sorted into membranes of secretory granules until they are activated by agonists such as thrombin and translocated to the plasma membrane from granules. Second, an increased level of mRNA and protein is induced by inflammatory mediators such as tumor necrosis factor-a (TNF-a), LPS, interleukin-4 (IL-4) while TNF-alpha. Selectin-neutralizing monoclonal antibodies, recombinant soluble P-selectin glycoprotein ligand 1 and small-molecule inhibitors of selectins have been tested in clinical trials on patients with multiple trauma, cardiac indications and pediatricasthma, respectively (reviewed in Ley, 2003; Trends Mol. Med, 9 (6): 263-267).

[0346] Protein: P-selectin Gene: SELP (Homo sapiens, chromosome 1, 169558087-169599377 [NCBI Reference Sequence: NC_{—}000001.10]; start site location: 169599312; strand: negative)

Gene Identification

| | |
|---|---|
| GeneID | 6403 |
| HGNC | 10721 |
| HPRD | 01433 |
| MIM | 173610 |

Targeted Sequences

| | | Relative |
|---|---|---|
| | | upstream |
| Sequence | | location to gene |
| ID | Sequence (5′-3′) | start site |
| 3184 | TAGCTACGAATAAAGAAATTTGTAG | 2694 |

Hot Zones (Relative upstream location to gene start site)
1550-1800
2650-2800
3100-3250

### Examples

Genetic Code (5′ Upstream Region)
(SEQ ID NO: 11962)
GTCAGGCTGGTCTTGACTCCTGACCTCAGGTGATCCACTCACCTTG
GCCTCCCAAAGCGCTGGGATTATGGCATGAGCCACTGAGTCTGGCTGAAT
GTTAGCTCTCTTGATGCTGTCCCATAAATCTTGTAGGCTTTCATCATTTC
TTTTCATTCTTTTTTCTCCTCTCACTGTATATTTTCAAAAACCTGTCTTC
AGTTCACAGATTCTTTCTTCTGCTTGATCAAGTCTGCTACTGGTGATTTC
TACTGCATTTCTCACTTCATTCATTATATTTTTCAGCTCCAATTTCTTTT
ATGATTTCAATCTTTCTGTTACATTTCTTATGTTGTGCATTTATTGTTTC
TCTGATTTCACCAAATTGTTTCTCTGTGTTTGCTTCAAAGTAACTGAGCT
TCTTTAAAAACAATTATCTTGAATCCATTGTCAGGCCATTTGTAGTACTC
CATTTCTTTTGGGTCAGCTACTGGGAAATTATTGTGTTTCTTAGGTGGTG
ATATTTTAATTTGGGTTTTCATGTTTCTTGCTGCCTTACACTGCTGTCTG
AGCATCTGGTGGATCTGCCCCAATTTCAGGCTGTATGGGCTGACTTTGGT
GGAGAAATACCTTCTTATGTGGAATAATGCGAGGATGCTGGCTGGGTGGG
ATGCAAAAGTTCTGACTTCAGTAGGGGCAAAGCTGTGTGGTCTCCATGCA
GATCTGTCAGCTGAGGTTGGTGTTAGTGAATACTACAGGGATCCTTAGAG
GCCAACACTGTGGGTATCTACAGTGGCAATGAGGCTGTTGAGGTTTTCAA
TTGTGACAAGTCCTCCATATCTCTTTTTTTCCCCACCTGGGAAGTCATGA
CTGAGGACATCCCTCTTGGAATTAGGTCTAACTTGCAGGCCTGCTCCTGG
TGGTGGTGACACTGGTGTCTGATGAACAGTGCCCATGGAGTGGCCAAGAG
CCAAGGCCTGAAGCATGGGCATGCATGGAGGGACCACAGCACCAGATTCA
ATTGTAGCAATGGTACCAGTGCCCAAGGCACAGGCATACTTACTATCACA
TTGATAATGGTGTGTAAAATGCAGGTACTTATAAAGCAGCTAAGGAGCCA
GGGACTTTACTGCATGCATACGCAGAGCTACAGTGGCTCCAGGATCCAGG
GTGTGGGCTAGCTCTCCTTGGTGGCTGAGCTGGTGACTAGAGCATGGACA
GGCACAGAGAAACCTTGACTCTAGGACCCAGGGTGTTCACTAGCTCACTA
TAGTGGTGGCTCTGGTGTTGGAGGTGTGGGTGTGTGTAGTACAGCCTCAG
AGACAGGGTCTGGAGCGCAGGTGTGCACATTACTACAGCAGCTCTGGAGT
TGAGAATATGGGTTACCTTTCTACAGTGGCTGAACTAGTGTCTGGAGCAA
AGACTTTCACAGAGAGAACTTGGCTTGGGGTCCCAGGGTGAGATCTAGTT
CACAACAGCAGTGACTCCAGTGTCTGAGACATGAGGAGGTGCACTGCAGC
CACAGAGCCACAGTCCAGAGTGTGAATATCTGTAGAGCAGCCACAACTTT
TGGGGATCAGGAACACACATAGACTTGTGAGAGGTGGTAACCCTGGCCCC
AGTCCTGGGGCAGTGCAACAATAGCTGCTTCTTGGTGAGGGGGTGTGAGG
GGTAGTGCAACTGTGTTTCCCTTTTTAGCATCCTGCTATGGGAATGGCTG
TTGGATAAAAGATGCCAGTGTCCTCTGTGGAGCAGGACACTGGGGGCCTC
AGTGGCTCTGTGTCACATGACTGACACAGATAGCCTACAAATTTCTTTAT
TCGTAGCTATCTCCTGGTGTCTCATATATGCCAGTCTCACCGGTGATTCT
TCTACATGGATATTCTTTCTTTTCTCCATTGTGTTGTTCCAAATTCTTTA
ACAGGCTCTTGAGCCCCATCCCCCAACTCCCCACCCTTGTGAGGGCTATT
TTGGTTTGTGTATAACTGTCTATGTTTGTTTTTTTGTTGGGGCATAAGGC
TGACATCTCCTACTCCACCATCTTGCTAATGTCACCTGCATAGGAATCTT
TTTATGCTTTCCTTATATTCACTAAAATTTAACAATATCAAACTTAAAAA
CATATGATCAATTGAACTTATTAATATCAAACTTATTATAAATAAGAAAC
TACCAGGCTGGGCATGGTGGCTCATGCCTGTAATCCCAACATTTTGGGAG
GCTGAGGTGAAAGGATCACTTGAGCCCAGGAATTCAAGACCAGCCTGGGA
AATATAGAGAGACCCTATCTCTAGAGATTTTTTTTTTTAATTAGCCAGTA
GTGATGGCACACATCTATAGTCCCAGCTACTCAGGAGGCTGAGGTGGGAG
AATTGCTTGAGCCCAGGAGGTCAAGGCTGGAGCAAGCAGTAATCATGCCA
CTGCACTCCAGCCTGGGCCGCAGAGTGAGACCCTGTCTCAAAAAAAGAAC
CTACTAGTCTACATACCACACTTCCTCATCCCCATCTGAGACTATATATA
TTTTTTCTAACATGAGGCAATGCCAAAAAGAGGGGCTGGTGAGTGAAAGT
AAGAACAGAAAGACATGGAGGCAAGTCTTATAGAATAATAGCCAACACTT
AAACTTACACTTAACAGCGTGATAGGTATTGTTCCAAACACATTAAATTC
ATTTAATGGTCCTTACATGTCTATGTATTTGGTGATTATTATCCTTATTA
TTCACATTGCTGAGTGTATTATTCTGTTCTCATGATGCTGATAGAGACAT
ACCCGAGACTGGATAACTTATTAAAAAAAAAAAGGTTTAATGGACTCACA
GTTCCACGTGGATGGGGAGTCCTCACAATCATGGTAGAAAGCAAAAGACA
CGTCTTACATGGCAGCAGGGAAGAGAGAGAAATGAGAACCAAACAAAAGG
GGTTTCCCCTTATAAAACCATCAGCTCTCATGCGACTTATTCACTACCAT
GAGAACAGTATGGGGGAAACCACCCCCATGATTCAATGATCTACCAGGTG
CCTCCCACAACCTGTGGGAATTATGGGAGCTACAATTCCAGATGAGATTT
GGGTGGGGACACAGCCAAACCACATCACTGAGGAAACTGAGTTATAGGGA
GATTAGTAACGCCCAACACAGCTGGTAGGTGGTGGAGCCAGGCAGTCTGA
CTCTAGGGTCTGGACTCTGAACTGCATCATGCTGCCAAGAAGTTCCTCAT
TTTTTCCTCTCTCTAAGTTTCCCTTATTCCCCTACAGTCATTCCTTCAAC
AGCATTTCCTTCACCATCTTTTCTACTTCTACTATATAATTAATTTTTTC
TTCTTGGTCCCAAATTCCAACGTGCAAATGCAGCCTTATATACCCTAATT
CATCTTTACCTTTAGACTTTCTTCCAATGTTTCTACTTCATTCCATTTTA
AATTTATCCATGAGATGCCTATTTACAAGCTGTAACCATCATGAAGTGAA
TGAAGAATAATACCTACTACTGTACAATAGAATTCCAAGAGTATAAATAG
GAGTTATGGCTTTCTGACTTGAAACTAAATACTTGATACTTGATTTTGCT
GTCTGAGATCAATCTGAAAAGTAATAATAATCACTAACATTTGTTGAGCA
TCAATTGTGGGCCAAGTGTCATTTCAATCACTCTGTACATATTAACTCAT
TTCATCCTACAACAACCCGGTGAGGCAAGTTCTGTTATTCTGTTTTACAG
TTGAGGAAACAGAGGCATAGAGAGCTTAAGTAGTTTGCCCAGTAGATAGC
CAGAAGAGGAGCCAGGATGGGTCTCGGGCAGTTTAACAGCACAGCTGAAG
TCTTAACCACTATGCCAACAGCTTTTTGGTCCTACACATCCCATGGGAAG
AGGAAAATAAAAAGGTATCTATTTGTATACCTTTTTATTTCTGATATAAG
AAGCAGAATTCCTTTCACATGACCTATGTCTATTTAATACGTCATTTTGA
AACTTACCAATAAAATTTCCCAAGCGCCAGAAAACTGTTAGTGGCTTTTT
CCATTTCTCTCTATTTTTTTTTGTGCTACTAATTTTGCTTCTTTCCCTCA
GAAGGCTGCCGGAATAGTAAACATTCACTGACATGTCATAATTACTGGAA
AATGGGCACTGGAAAATCACATTGTAATTAATTCAAAGCATGTTTTCCAA
ATGTACTACTTTAAATTGGAGCTTATATCATAATCCAAGGAAACCTTTGT
GTGTGTACTGTTCCCACATTGCTCAGCCTGGGATATCCAGGAGTAATTCA
CCTTGCGCCTGCCTCCAGACCATCTTCCATGGAAGGGGGTGACCCCTTGC
CTCTTGGCAACCACTATTTCTAAGCTGCCAACATTACTCTTGCATTATCA
ACATTCTAACTTCATGGGAAGGGCTGTGGTGAGTTTCTGGAATGTGAATA
GGAAGTTGTTTTTCTAAACAGCCTGACACTGAGGGGAGGCAGTGAGACTG
TAAGCAGTCTGGGTTGGGCAGAAGGCAGAAAACCAGCAGAGTCACAGAGG
AGATG

[0348] 14) IL-6. Interleukin 6 (IL-6) acts as both a pro-inflammatory and anti-inflammatory cytokine IL-6 is secreted by T cells and macrophages to stimulate immune response, e.g. during infection and after trauma, especially burns or other tissue damage leading to inflammation. IL-6 also plays a role in fighting infection, as IL-6 has been shown in mice to be required for resistance against bacterium Streptococcus pneumoniae. IL-6 is relevant to many diseases such as diabetes, atherosclerosis, depression, Alzheimer's Disease, systemic lupus erythematosus, multiple myeloma, prostate cancer, behcet's disease,[22] and rheumatoid arthritis (Kishimoto, International Immunology, Vol. 22, No. 5, pp. 347-352). IL-6 is also considered a myokine, a cytokine produced from muscle, and is elevated in response to muscle contraction. It is significantly elevated with exercise, and precedes the appearance of other cytokines in the circulation. During exercise, it is thought to act in a hormone-like manner to mobilize extracellular substrates and/or augment substrate delivery. Additionally, osteoblasts secrete IL-6 to stimulate osteoclast formation. Smooth muscle cells in the tunica media of many blood vessels also produce IL-6 as a pro-inflammatory cytokine IL-6's role as an anti-inflammatory cytokine is mediated through its inhibitory effects on TNF-alpha and IL-1, and activation of IL-1ra and IL-10.

[0349] Advanced/metastatic cancer patients have higher levels of IL-6 in their blood. IL-6 is responsible for stimulating acute phase protein synthesis, as well as the production of neutrophils in the bone marrow. It supports the growth of B cells and is antagonistic to regulatory T cells. Therefore there is interest in developing anti-IL-6 agents as therapy against many of these diseases (reviewed in Barton, Expert Opin. Ther. Targets 9 (4): 737-752).

[0350] Protein: IL-6 Gene: IL-6 (Homo sapiens, chromosome 7, 22766766-22771621 [NCBI Reference Sequence: NC_{—}000007.13]; start site location: 22766882; strand: positive)

Gene Identification

| | |
|---|---|
| GeneID | 3569 |
| HGNC | 6018 |
| HPRD | 00970 |
| MIM | 147620 |

Targeted Sequences

| | | | Relative |
|---|---|---|---|
| | | | upstream |
| | | | location |
| | | | to gene |
| Sequence | Design | | start |
| ID No: | ID | Sequence (5′-3′) | site |
| 3185 | | CACCGCGTGGCTTCTGCCACTTTC | 723 |
| 3206 | | TACGGACGCAGGCACGGCTCTAG | 1117 |
| 3226 | | CAGCTCCGCAGCCGTGCACTGTG | 1722 |
| 3255 | | CTTCACCGATTGTCTAAACAGAGAC | 1525 |
| 3256 | IL6_1 | TTCGTTCCCGGTGGGCTCGAGGGC | 35 |
| 3276 | | TGCTTCCGCGTCGGCACCCAAG | 1150 |

Target Shift Sequences

| | | Relative |
|---|---|---|
| | | upstream |
| | | location to |
| Sequence ID | | gene start |
| No: | Sequence (5′-3′) | site |
| 3185 | CACCGCGTGGCTTCTGCCACTTTC | 723 |
| 3186 | ACCGCGTGGCTTCTGCCACT | 724 |
| 3187 | CCGCGTGGCTTCTGCCACTT | 725 |
| 3188 | CGCGTGGCTTCTGCCACTTT | 726 |
| 3189 | GCGTGGCTTCTGCCACTTTC | 727 |
| 3190 | CGTGGCTTCTGCCACTTTCT | 728 |
| 3191 | CCACCGCGTGGCTTCTGCCA | 722 |
| 3192 | GCCACCGCGTGGCTTCTGCC | 721 |
| 3193 | TGCCACCGCGTGGCTTCTGC | 720 |
| 3194 | TTGCCACCGCGTGGCTTCTG | 719 |
| 3195 | TTTGCCACCGCGTGGCTTCT | 718 |
| 3196 | TTTTGCCACCGCGTGGCTTC | 717 |
| 3197 | TTTTTGCCACCGCGTGGCTT | 716 |
| 3198 | CTTTTTGCCACCGCGTGGCT | 715 |
| 3199 | CCTTTTTGCCACCGCGTGGC | 714 |
| 3200 | TCCTTTTTGCCACCGCGTGG | 713 |
| 3201 | CTCCTTTTTGCCACCGCGTG | 712 |
| 3202 | ACTCCTTTTTGCCACCGCGT | 711 |
| 3203 | GACTCCTTTTTGCCACCGCG | 710 |
| 3204 | TGACTCCTTTTTGCCACCGC | 709 |
| 3205 | GTGACTCCTTTTTGCCACCG | 708 |
| 3206 | TACGGACGCAGGCACGGCTCTAG | 1117 |
| 3207 | ACGGACGCAGGCACGGCTCT | 1118 |
| 3208 | CGGACGCAGGCACGGCTCTA | 1119 |
| 3209 | GGACGCAGGCACGGCTCTAG | 1120 |
| 3210 | GACGCAGGCACGGCTCTAGG | 1121 |
| 3211 | ACGCAGGCACGGCTCTAGGC | 1122 |
| 3212 | CGCAGGCACGGCTCTAGGCT | 1123 |
| 3213 | GCAGGCACGGCTCTAGGCTC | 1124 |
| 3214 | CAGGCACGGCTCTAGGCTCT | 1125 |
| 3215 | AGGCACGGCTCTAGGCTCTG | 1126 |
| 3216 | GGCACGGCTCTAGGCTCTGA | 1127 |
| 3217 | GCACGGCTCTAGGCTCTGAA | 1128 |
| 3218 | CACGGCTCTAGGCTCTGAAT | 1129 |
| 3219 | ACGGCTCTAGGCTCTGAATC | 1130 |
| 3220 | CGGCTCTAGGCTCTGAATCT | 1131 |
| 3221 | CTACGGACGCAGGCACGGCT | 1116 |
| 3222 | ACTACGGACGCAGGCACGGC | 1115 |
| 3223 | AACTACGGACGCAGGCACGG | 1114 |
| 3224 | AAACTACGGACGCAGGCACG | 1113 |
| 3225 | GAAACTACGGACGCAGGCAC | 1112 |
| 3226 | CAGCTCCGCAGCCGTGCACTGTG | 1700 |
| 3227 | AGCTCCGCAGCCGTGCACTG | 1701 |
| 3228 | GCTCCGCAGCCGTGCACTGT | 1702 |
| 3229 | CTCCGCAGCCGTGCACTGTG | 1703 |
| 3230 | TCCGCAGCCGTGCACTGTGA | 1704 |
| 3231 | CCGCAGCCGTGCACTGTGAT | 1705 |
| 3232 | CGCAGCCGTGCACTGTGATC | 1706 |
| 3233 | GCAGCCGTGCACTGTGATCC | 1707 |
| 3234 | CAGCCGTGCACTGTGATCCG | 1708 |
| 3235 | AGCCGTGCACTGTGATCCGT | 1709 |
| 3236 | GCCGTGCACTGTGATCCGTC | 1710 |
| 3237 | CCGTGCACTGTGATCCGTCT | 1711 |
| 3238 | CGTGCACTGTGATCCGTCTA | 1712 |
| 3239 | GTGCACTGTGATCCGTCTAT | 1713 |
| 3240 | TGCACTGTGATCCGTCTATG | 1714 |
| 3241 | GCACTGTGATCCGTCTATGT | 1715 |
| 3242 | CACTGTGATCCGTCTATGTA | 1716 |
| 3243 | CCAGCTCCGCAGCCGTGCAC | 1699 |
| 3244 | CCCAGCTCCGCAGCCGTGCA | 1698 |
| 3245 | TCCCAGCTCCGCAGCCGTGC | 1697 |
| 3246 | CTCCCAGCTCCGCAGCCGTG | 1696 |
| 3247 | GCTCCCAGCTCCGCAGCCGT | 1695 |
| 3248 | TGCTCCCAGCTCCGCAGCCG | 1694 |
| 3249 | CTGCTCCCAGCTCCGCAGCC | 1693 |
| 3250 | ACTGCTCCCAGCTCCGCAGC | 1692 |
| 3251 | CACTGCTCCCAGCTCCGCAG | 1691 |
| 3252 | CCACTGCTCCCAGCTCCGCA | 1690 |
| 3253 | GCCACTGCTCCCAGCTCCGC | 1689 |
| 3254 | AGCCACTGCTCCCAGCTCCG | 1688 |
| 3255 | CTTCACCGATTGTCTAAACAGAGAC | 1522 |
| 3256 | TTCGTTCCCGGTGGGCTCGAGGGC | 35 |
| 3257 | TCGTTCCCGGTGGGCTCGAG | 36 |
| 3258 | CGTTCCCGGTGGGCTCGAGG | 37 |
| 3259 | GTTCCCGGTGGGCTCGAGGG | 38 |
| 3260 | TTCCCGGTGGGCTCGAGGGC | 39 |
| 3261 | TCCCGGTGGGCTCGAGGGCA | 40 |
| 3262 | CCCGGTGGGCTCGAGGGCAG | 41 |
| 3263 | CCGGTGGGCTCGAGGGCAGA | 42 |
| 3264 | TTTCGTTCCCGGTGGGCTCG | 34 |
| 3265 | CTTTCGTTCCCGGTGGGCTC | 33 |
| 3266 | TCTTTCGTTCCCGGTGGGCT | 32 |
| 3267 | CTCTTTCGTTCCCGGTGGGC | 31 |
| 3268 | TCTCTTTCGTTCCCGGTGGG | 30 |
| 3269 | TTCTCTTTCGTTCCCGGTGG | 29 |
| 3270 | CTTCTCTTTCGTTCCCGGTG | 28 |
| 3271 | GCTTCTCTTTCGTTCCCGGT | 27 |
| 3272 | AGCTTCTCTTTCGTTCCCGG | 26 |
| 3273 | GAGCTTCTCTTTCGTTCCCG | 25 |
| 3274 | AGAGCTTCTCTTTCGTTCCC | 24 |
| 3275 | TAGAGCTTCTCTTTCGTTCC | 23 |
| 3276 | TGCTTCCGCGTCGGCACCCAAG | 1150 |
| 3277 | GCTTCCGCGTCGGCACCCAA | 1151 |
| 3278 | CTTCCGCGTCGGCACCCAAG | 1152 |
| 3279 | TTCCGCGTCGGCACCCAAGA | 1153 |
| 3280 | TCCGCGTCGGCACCCAAGAA | 1154 |
| 3281 | CCGCGTCGGCACCCAAGAAT | 1155 |
| 3282 | CGCGTCGGCACCCAAGAATT | 1156 |
| 3283 | GCGTCGGCACCCAAGAATTT | 1157 |
| 3284 | CGTCGGCACCCAAGAATTTC | 1158 |
| 3285 | GTCGGCACCCAAGAATTTCT | 1159 |
| 3286 | TCGGCACCCAAGAATTTCTT | 1160 |
| 3287 | CGGCACCCAAGAATTTCTTA | 1161 |
| 3288 | CTGCTTCCGCGTCGGCACCC | 1149 |
| 3289 | TCTGCTTCCGCGTCGGCACC | 1148 |
| 3290 | ATCTGCTTCCGCGTCGGCAC | 1147 |
| 3291 | AATCTGCTTCCGCGTCGGCA | 1146 |
| 3292 | GAATCTGCTTCCGCGTCGGC | 1145 |
| 3293 | TGAATCTGCTTCCGCGTCGG | 1144 |
| 3294 | CTGAATCTGCTTCCGCGTCG | 1143 |
| 3295 | TCTGAATCTGCTTCCGCGTC | 1142 |
| 3296 | CTCTGAATCTGCTTCCGCGT | 1141 |
| 3297 | GCTCTGAATCTGCTTCCGCG | 1140 |
| 3298 | GGCTCTGAATCTGCTTCCGC | 1139 |
| 3299 | AGGCTCTGAATCTGCTTCCG | 1138 |

Hot Zones (Relative upstream location to gene start site)
1-800
1050-1250
1400-1800
2850-3400

### Examples

[0351] In FIG. 31, In MCF7 (human mammary breast cell line), IL6_{—}1 (145) produced statistically significant (P<0.05) inhibition at 10 μM compared to the untreated and negative control values. The IL6 sequence IL6_{—}1 (145) fits the independent and dependent DNAi motif claims.

[0352] The secondary structure for IL6_{—}1 (145) is shown in FIG. 32.

Genetic Code (5′ Upstream Region)
(SEQ ID NO: 11963)
AGGGACCTCCCCAGCCATGGGGGCAGGGCCAAATGGGGCTTCTTCA
GGACCAGCAAAGCCATTTTTCTCATCAGCAAACTAGCTTCAGAGAAGTTT
GCAATCAGGGCACTCTCTTCCAAGCCTAGAGACCCAGGGAAAGGGGTACG
GGGGTGTCCCAAGGCAAAGAGAATCTACACTTTTTGCCCCCGGAGAGGCT
ACTTCCCTCCCAAGATGCCTGGGATTTTCCACTTCAGCAGGGGGAAGGTA
AGTCACATAGCAAAATAATGAGGGCACAGAACAGATGACCTCCCTATAGA
GTTTTGAATGAGAAACACAGCAGGGCAGATGTGCCCCTTCTCTAGTCTAG
GAGGAGCTAGGTCCAGCCCCTGAACATCCTCCCCCTCAGAAAAGCTGAGG
CCAGACTAAGAATTCACCAGACCAAGGAGCTACAACAGGACATCAGAGCT
GAGGCTGCAAAGCCAGGACTGAGACCAGACCAGGCAGGAAACTGTCAAGA
GCTTTGGTCACCAGGCCTGGCTGCCCTCCAACATCAGCTGGCTCTTTCTA
AATTGACACACCACATGTCCCTAAAATTCTCTCTTCAAGTAATACCACCA
TCAAAGCAGGACATTTCCCAGAGCCTTAGAGCCTGGTGTCTGCTCAGTGG
GACTCAACCCCAGAAGAAGCTGTTAAATCACCCACTGTTTCAGTTTACAA
ACTTCTTACGACTTGGCAACAAGTGAAACTACATTCTGGCAGCAACTGCA
AGTTCCCTAGTACCCAGGACTTCCCGTTTTTTCTTGCTGTACTCCCTCCT
GTTAAATCACAGACTCATCCATCTCCAACCCCCAGAATATAGAGAAAGAG
CACAACACTACATCTTAACTCCTGAGACGTGGAGAACACTTCTCCTCCTG
AGAGCTTAAGTACCAAATGGAAGCTACTTTTCCCCCTTGGTCTCAAATGT
ATTACTAGATTCTGAACTGGACTCCACCATCACGTAAGAAAGCAGTCATG
GGCAGTAATTCTGGGAGATCCAGATAGGACATGCCAGCCCCACACTGGTG
GCATAGGAAGCCAAGTTGCTGCTTCCTCCCTGTGCACTCCCATTTGTCTG
GCCTCTCTTGATCTCAGCTGGCGCTCACTTCACATCAGCTATGATGCAAT
CCAGCAACTAAAGTATTAGTTAATAAATGCTGACAGCACAGCCTTTTCTG
GTCACGTATTCATACTAAAATACGGGGGAGAGTTGGGGGGAGAGGGGGAT
ATATGGGAAATCTCTGTACCTTCCTCTCCATTTTGCTATGACCTAAAGCT
GCCCTTTAAAAAATACAAGGGGCTGGGCACAGTGGTTCACGCCTGTAAAC
CCAGCACTTTGGGAGGCCGAGGCGCGTGGATCACCTGAGGTCAGGAGTTC
AAGACCCGCCTGGCCAACATGGCAAAACCCCGTTTCTACTAAAAATACAA
AAAGTAGCTGGGCGTGGTCGCATGCATCTGTAGTCCCAGCTACTCAGGAG
GCTGAGGCAAGAGAATTGCTTGAACCTGGGAGGCGGCGGTTGAAGTGAGC
CAAGATCATGCCATTGCCCTCCAGCCTGGGCAACAGAGCAAGACTCCTTC
TCAAGAGAAAAAACAAAACAAAACAAGAAAAAACAAAGAATGAGCTCTCC
ACGCGAAAAATCCATTGAGATGCAAAGGAAGGAAGCTATCATTGTGGAAT
TGCACATGTCAGTTACATTAACGTTTTTGGAGCAAGGTAGAGCTCATCTC
TCCCACAAGCAAATTCCAGCCCAAAGCATTGATACTAATAAAGTGCCATG
CTGCGATGTGCAGGGGGCAGACAGTGTCTCCAAGCTCCCTACACACATGC
CTTCCCACAGTTTGCCCTTTCTTGACCCCAGAAGCATCAGGCCCCTTCAC
CCTCGAGGGCCACTATCAGGAGTTTGAATTAATGGCAATCACCATGCACA
GGGAAGGCTGTGGAATTCTGACATAAAAACACTTAGTGGAGGGCTTGGAA
AAAGTCTAGTAGGAGCAAGACGCAAGCTGGACTAATTATCTAAAACAAGA
GACCTGGTTTGGGGATCTTAATGTTCTCAAAAAAGAAAATTATTATTATT
TTTCATTTTGCACTTTGTGCCATAAAACATTTTCAACAAAACATAGAATC
TCATTTCTTTTGAGGGAAAATGATTGGGAGACCAGCTCATTGCTGGCACA
GAGGCCTGGTTCATTCATAATTCCTTCATAGGCAAGACACCAGGTGAACC
GATATAGCCGAGCTGGAAGAGCTCTCCAAGGCAGAGACTCTGAGCCAAGG
AATGTTCAAAGAGCTAGCATGTATTGTGGGATTACTATGCGCCAGGAATT
TTTTACACTGCATCACGTTCCATCTTCACAACAGCCCTAGAAAGGAAGAA
CTATTATTACCCCCGTTTTATAGGTGAATAAACAAGGGCACAGGTCCTTG
ATGTAACAGCCAGGATCAAACAGCTGGGAAGACGAGAAAACCTTTCCCAG
GCTAGGATAACAGAGGATTTGGTTGAAAATACAGGCAATTAGGTGCTACC
TCTGGGAAAAGGGGCCAGGAGAGGAAGGAGACACTTTTCCCTGCATGCCC
TGATGTCCTATTTGAACATTTTATCATGAACACGAACTTCCTATTTAAAA
AACACTTTTTATTGAAAAGATAAATCTGTGTGTTGTATTGTGTCACTCAG
TTCAAGTACTTGAAATTTATTGAATTGTATTTTCTAAAAAATAGATAGTT
GAGTAAAAGCAAGCTCACATTACATAGACGGATCACAGTGCACGGCTGCG
GAGCTGGGAGCAGTGGCTTCGTTTCATGCAGGAAAGAGAACTTGGTTCAG
GAGTGTCTACGTTGCTTAAGACAGGAGAGCACTAAAAATGAAACCATCCA
GCCATCCTCCCCCATTTTCATTTTCACACCAAAGAATCCCACCGCGGCAG
AGGACCACCGTCTCTGTTTAGACAATCGGTGAAGAATGGATGACCTCACT
TTCCCCAACAGGCGGGTCCTGAAATGTTATGCACGAAACAAAACTTGAGT
AAATGCCCAACAGAGGTCACTGTTTTATCGATCTTGAAGAGATCTCTTCT
TAGCAAAGCAAAGAAACCGATTGTGAAGGTAACACCATGTTTGGTAAATA
AGTGTTTTGGTGTTGTGCAAGGGTCTGGTTTCAGCCTGAAGCCATCTCAG
AGCTGTCTGGGTCTCTGGAGACTGGAGGGACAACCTAGTCTAGAGCCCAT
TTGCATGAGACCAAGGATCCTCCTGCAAGAGACACCATCCTGAGGGAAGA
GGGCTTCTGAACCAGCTTGACCCAATAAGAAATTCTTGGGTGCCGACGCG
GAAGCAGATTCAGAGCCTAGAGCCGTGCCTGCGTCCGTAGTTTCCTTCTA
GCTTCTTTTGATTTCAAATCAAGACTTACAGGGAGAGGGAGCGATAAACA
CAAACTCTGCAAGATGCCACAAGGTCCTCCTTTGACATCCCCAACAAAGA
GGTGAGTAGTATTCTCCCCCTTTCTGCCCTGAACCAAGTGGGCTTCAGTA
ATTTCAGGGCTCCAGGAGACCTGGGGCCCATGCAGGTGCCCCAGTGAAAC
AGTGGTGAAGAGACTCAGTGGCAATGGGGAGAGCACTGGCAGCACAAGGC
AAACCTCTGGCACAGAGAGCAAAGTCCTCACTGGGAGGATTCCCAAGGGG
TCACTTGGGAGAGGGCAGGGCAGCAGCCAACCTCCTCTAAGTGGGCTGAA
GCAGGTGAAGAAAGTGGCAGAAGCCACGCGGTGGCAAAAAGGAGTCACAC
ACTCCACCTGGAGACGCCTTGAAGTAACTGCACGAAATTTGAGGATGGCC
AGGCAGTTCTACAACAGCCGCTCACAGGGAGAGCCAGAACACAGAAGAAC
TCAGATGACTGGTAGTATTACCTTCTTCATAATCCCAGGCTTGGGGGGCT
GCGATGGAGTCAGAGGAAACTCAGTTCAGAACATCTTTGGTTTTTACAAA
TACAAATTAACTGGAACGCTAAATTCTAGCCTGTTAATCTGGTCACTGAA
AAAAAATTTTTTTTTTTTCAAAAAACATAGCTTTAGCTTATTTTTTTTCT
CTTTGTAAAACTTCGTGCATGACTTCAGCTTTACTCTTTGTCAAGACATG
CCAAAGTGCTGAGTCACTAATAAAAGAAAAAAAGAAAGTAAAGGAAGAGT
GGTTCTGCTTCTTAGCGCTAGCCTCAATGACGACCTAAGCTGCACTTTTC
CCCCTAGTTGTGTCTTGCCATGCTAAAGGACGTCACATTGCACAATCTTA
ATAAGGTTTCCAATCAGCCCCACCCGCTCTGGCCCCACCCTCACCCTCCA
ACAAAGATTTATCAAATGTGGGATTTTCCCATGAGTCTCAATATTAGAGT
CTCAACCCCCAATAAATATAGGACTGGAGATGTCTGAGGCTCATTCTGCC
CTCGAGCCCACCGGGAACGAAAGAGAAGCTCTATCTCCCCTCCAGGAGCC
CAGCTATG

[0353] 15) IL-23. IL-23 is produced by dendritic cells and macrophages. Interleukin-23 (IL-23) is a heterodimeric cytokine consisting of two subunits (p40-S-S-p19): p40, a component of the IL-12 cytokine and p19, the product of the IL23 gene (also considered the IL-23 alpha subunit). IL-23 is an important part of the inflammatory response against infection. Both IL-23 and IL-12 can activate the transcription activator STAT4, and stimulate the production of interferon-gamma (IFNG). In contrast to IL-12, which acts mainly on naive CD4(+) T cells, IL-23 preferentially acts on memory CD4(+) T cells (Oppmann et al., 2001, Immunity 13 (5): 715-25).

[0354] IL-23 promotes upregulation of the matrix metalloprotease MMP9, increases angiogenesis and reduces CD8+ T-cell infiltration. In conjunction with IL-6 and TGF-β1, IL-23 stimulates naive CD4+ T cells to differentiate into a novel subset of cells called Th17 cells, which are distinct from the classical Th1 and Th2 cells. Th17 cells produce IL-17, a proinflammatory cytokine that enhances T cell priming and stimulates the production of other proinflammatory molecules such as IL-1, IL-6, TNF-alpha, NOS-2, and chemokines resulting in inflammation.

[0355] IL-23 may also play a role in the intestinal immune system which has the challenge of maintaining both a state of tolerance toward intestinal antigens and the ability to combat pathogens. This balance is partially achieved by reciprocal regulation of proinflammatory, effector CD4+ T cells and tolerizing, suppressive regulatory T cells. Inflammatory bowel disease (IBD) comprises Crohn's disease (CD) and ulcerative colitis (UC). Genome-wide association studies have linked CD to a number of IL-23 pathway genes, notably IL23R (interleukin 23 receptor). Similar associations in IL-23 pathway genes have been observed in UC. IL23R is a key differentiation feature of CD4+ Th17 cells, effector cells that are critical in mediating antimicrobial defenses. However, IL-23 and Th17 cell dysregulation can lead to end-organ inflammation. The differentiation of inflammatory Th17 cells and suppressive CD4+ Treg subsets is reciprocally regulated by relative concentrations of TGFβ, with the concomitant presence of proinflammatory cytokines favoring Th17 differentiation. The identification of IL-23 pathway and Th17 expressed genes in IBD pathogenesis highlights the importance of the proper regulation of the IL-23/Th17 pathway in maintaining intestinal immune homeostasis (reviewed in Abraham and Cho, 2009; Ann. Rev. Med. 60: 97-110).

[0356] Protein: IL23 Gene: IL23A (Homo sapiens, chromosome 12, 56732663-56734194 [NCBI Reference Sequence: NC_{—}000012.11]; start site location: 56732829; strand: positive)

Gene Identification

| | |
|---|---|
| GeneID | 51561 |
| HGNC | 15488 |
| HPRD | 12026 |
| MIM | 605580 |

Targeted Sequences

| | | Relative upstream |
|---|---|---|
| Sequence | | location to |
| ID No: | Sequence (5′-3′) | gene start site |
| 3300 | TCCCTGCATTGTAAGGCCCGCC | 195 |
| 3319 | CACAGCGGGGATGGGGTGGGAGGG | 414 |
| 3320 | GACGTCAGAATGAGGCCATCG | 1296 |
| 3341 | GAGCCAGCACGGTGGTGGGCGCC | 1651 |
| 3365 | GCGTTTGTCCCACCGGCGCCCCG | 4861 |
| 3479 | TAACGCCACCCAACAAGTCCGGCG | 4830 |

Target Shift Sequences

| | | Relative upstream |
|---|---|---|
| Sequence | | location to |
| ID No: | Sequence (5′-3′) | gene start site |
| 3300 | TCCCTGCATTGTAAGGCCCGCC | 195 |
| 3301 | CCCTGCATTGTAAGGCCCGC | 196 |
| 3302 | CCTGCATTGTAAGGCCCGCC | 197 |
| 3303 | CTGCATTGTAAGGCCCGCCC | 198 |
| 3304 | TGCATTGTAAGGCCCGCCCT | 199 |
| 3305 | GCATTGTAAGGCCCGCCCTT | 200 |
| 3306 | CATTGTAAGGCCCGCCCTTT | 201 |
| 3307 | ATTGTAAGGCCCGCCCTTTA | 202 |
| 3308 | TTGTAAGGCCCGCCCTTTAT | 203 |
| 3309 | TGTAAGGCCCGCCCTTTATA | 204 |
| 3310 | GTAAGGCCCGCCCTTTATAC | 205 |
| 3311 | TAAGGCCCGCCCTTTATACC | 206 |
| 3312 | AAGGCCCGCCCTTTATACCA | 207 |
| 3313 | AGGCCCGCCCTTTATACCAG | 208 |
| 3314 | GGCCCGCCCTTTATACCAGC | 209 |
| 3315 | GCCCGCCCTTTATACCAGCA | 210 |
| 3316 | CCCGCCCTTTATACCAGCAG | 211 |
| 3317 | CCGCCCTTTATACCAGCAGG | 212 |
| 3318 | CGCCCTTTATACCAGCAGGT | 213 |
| 3319 | CACAGCGGGGATGGGGTGGGAGGG | 414 |
| 3320 | GACGTCAGAATGAGGCCATCG | 1296 |
| 3321 | ACGTCAGAATGAGGCCATCG | 1297 |
| 3322 | CGTCAGAATGAGGCCATCGG | 1298 |
| 3323 | GTCAGAATGAGGCCATCGGT | 1299 |
| 3324 | TCAGAATGAGGCCATCGGTG | 1300 |
| 3325 | CAGAATGAGGCCATCGGTGA | 1301 |
| 3326 | AGAATGAGGCCATCGGTGAC | 1302 |
| 3327 | GAATGAGGCCATCGGTGACC | 1303 |
| 3328 | AATGAGGCCATCGGTGACCA | 1304 |
| 3329 | ATGAGGCCATCGGTGACCAC | 1305 |
| 3330 | TGAGGCCATCGGTGACCACA | 1306 |
| 3331 | GAGGCCATCGGTGACCACAC | 1307 |
| 3332 | AGGCCATCGGTGACCACACA | 1308 |
| 3333 | GGCCATCGGTGACCACACAG | 1309 |
| 3334 | GCCATCGGTGACCACACAGC | 1310 |
| 3335 | CCATCGGTGACCACACAGCT | 1311 |
| 3336 | CATCGGTGACCACACAGCTG | 1312 |
| 3337 | ATCGGTGACCACACAGCTGG | 1313 |
| 3338 | TCGGTGACCACACAGCTGGC | 1314 |
| 3339 | CGGTGACCACACAGCTGGCT | 1315 |
| 3340 | AGACGTCAGAATGAGGCCAT | 1295 |
| 3341 | GAGCCAGCACGGTGGTGGGCGCC | 1651 |
| 3342 | AGCCAGCACGGTGGTGGGCG | 1652 |
| 3343 | GCCAGCACGGTGGTGGGCGC | 1653 |
| 3344 | CCAGCACGGTGGTGGGCGCC | 1654 |
| 3345 | CAGCACGGTGGTGGGCGCCT | 1655 |
| 3346 | AGCACGGTGGTGGGCGCCTA | 1656 |
| 3347 | GCACGGTGGTGGGCGCCTAT | 1657 |
| 3348 | CACGGTGGTGGGCGCCTATA | 1658 |
| 3349 | ACGGTGGTGGGCGCCTATAG | 1659 |
| 3350 | CGGTGGTGGGCGCCTATAGT | 1660 |
| 3351 | GGTGGTGGGCGCCTATAGTC | 1661 |
| 3352 | GTGGTGGGCGCCTATAGTCC | 1662 |
| 3353 | TGGTGGGCGCCTATAGTCCC | 1663 |
| 3354 | GGTGGGCGCCTATAGTCCCA | 1664 |
| 3355 | GTGGGCGCCTATAGTCCCAG | 1665 |
| 3356 | TGGGCGCCTATAGTCCCAGC | 1666 |
| 3357 | GGGCGCCTATAGTCCCAGCT | 1667 |
| 3358 | GGCGCCTATAGTCCCAGCTA | 1668 |
| 3359 | GCGCCTATAGTCCCAGCTAC | 1669 |
| 3360 | CGCCTATAGTCCCAGCTACT | 1670 |
| 3361 | TGAGCCAGCACGGTGGTGGG | 1650 |
| 3362 | ATGAGCCAGCACGGTGGTGG | 1649 |
| 3363 | AATGAGCCAGCACGGTGGTG | 1648 |
| 3364 | AAATGAGCCAGCACGGTGGT | 1647 |
| 3365 | GCGTTTGTCCCACCGGCGCCCCG | 4861 |
| 3366 | CGTTTGTCCCACCGGCGCCC | 4862 |
| 3367 | GTTTGTCCCACCGGCGCCCC | 4863 |
| 3368 | TTTGTCCCACCGGCGCCCCG | 4864 |
| 3369 | TTGTCCCACCGGCGCCCCGT | 4865 |
| 3370 | TGTCCCACCGGCGCCCCGTA | 4866 |
| 3371 | GTCCCACCGGCGCCCCGTAA | 4867 |
| 3372 | TCCCACCGGCGCCCCGTAAC | 4868 |
| 3373 | CCCACCGGCGCCCCGTAACC | 4869 |
| 3374 | CCACCGGCGCCCCGTAACCT | 4870 |
| 3375 | CACCGGCGCCCCGTAACCTC | 4871 |
| 3376 | ACCGGCGCCCCGTAACCTCT | 4872 |
| 3377 | CCGGCGCCCCGTAACCTCTT | 4873 |
| 3378 | CGGCGCCCCGTAACCTCTTT | 4874 |
| 3379 | GGCGCCCCGTAACCTCTTTT | 4875 |
| 3380 | GCGCCCCGTAACCTCTTTTT | 4876 |
| 3381 | CGCCCCGTAACCTCTTTTTC | 4877 |
| 3382 | GCCCCGTAACCTCTTTTTCC | 4878 |
| 3383 | CCCCGTAACCTCTTTTTCCG | 4879 |
| 3384 | CCCGTAACCTCTTTTTCCGG | 4880 |
| 3385 | CCGTAACCTCTTTTTCCGGC | 4881 |
| 3386 | CGTAACCTCTTTTTCCGGCG | 4882 |
| 3387 | GTAACCTCTTTTTCCGGCGC | 4883 |
| 3388 | TAACCTCTTTTTCCGGCGCG | 4884 |
| 3389 | AACCTCTTTTTCCGGCGCGT | 4885 |
| 3390 | ACCTCTTTTTCCGGCGCGTG | 4886 |
| 3391 | CCTCTTTTTCCGGCGCGTGC | 4887 |
| 3392 | CTCTTTTTCCGGCGCGTGCG | 4888 |
| 3393 | TCTTTTTCCGGCGCGTGCGT | 4889 |
| 3394 | CTTTTTCCGGCGCGTGCGTC | 4890 |
| 3395 | TTTTTCCGGCGCGTGCGTCA | 4891 |
| 3396 | TTTTCCGGCGCGTGCGTCAC | 4892 |
| 3397 | TTTCCGGCGCGTGCGTCACA | 4893 |
| 3398 | TTCCGGCGCGTGCGTCACAC | 4894 |
| 3399 | TCCGGCGCGTGCGTCACACG | 4895 |
| 3400 | CCGGCGCGTGCGTCACACGC | 4896 |
| 3401 | CGGCGCGTGCGTCACACGCT | 4897 |
| 3402 | GGCGCGTGCGTCACACGCTC | 4898 |
| 3403 | GCGCGTGCGTCACACGCTCT | 4899 |
| 3404 | CGCGTGCGTCACACGCTCTC | 4900 |
| 3405 | GCGTGCGTCACACGCTCTCT | 4901 |
| 3406 | CGTGCGTCACACGCTCTCTC | 4902 |
| 3407 | GTGCGTCACACGCTCTCTCC | 4903 |
| 3408 | TGCGTCACACGCTCTCTCCT | 4904 |
| 3409 | GCGTCACACGCTCTCTCCTG | 4905 |
| 3410 | CGTCACACGCTCTCTCCTGG | 4906 |
| 3411 | GTCACACGCTCTCTCCTGGG | 4907 |
| 3412 | TCACACGCTCTCTCCTGGGG | 4908 |
| 3413 | CACACGCTCTCTCCTGGGGT | 4909 |
| 3414 | ACACGCTCTCTCCTGGGGTC | 4910 |
| 3415 | CACGCTCTCTCCTGGGGTCG | 4911 |
| 3416 | ACGCTCTCTCCTGGGGTCGC | 4912 |
| 3417 | CGCTCTCTCCTGGGGTCGCC | 4913 |
| 3418 | GCTCTCTCCTGGGGTCGCCG | 4914 |
| 3419 | CTCTCTCCTGGGGTCGCCGT | 4915 |
| 3420 | TCTCTCCTGGGGTCGCCGTA | 4916 |
| 3421 | CTCTCCTGGGGTCGCCGTAC | 4917 |
| 3422 | TCTCCTGGGGTCGCCGTACC | 4918 |
| 3423 | CTCCTGGGGTCGCCGTACCT | 4919 |
| 3424 | TCCTGGGGTCGCCGTACCTG | 4920 |
| 3425 | CCTGGGGTCGCCGTACCTGG | 4921 |
| 3426 | CTGGGGTCGCCGTACCTGGC | 4922 |
| 3427 | TGGGGTCGCCGTACCTGGCT | 4923 |
| 3428 | GGGGTCGCCGTACCTGGCTC | 4924 |
| 3429 | GGGTCGCCGTACCTGGCTCC | 4925 |
| 3430 | GGTCGCCGTACCTGGCTCCT | 4926 |
| 3431 | GTCGCCGTACCTGGCTCCTT | 4927 |
| 3432 | TCGCCGTACCTGGCTCCTTC | 4928 |
| 3433 | CGCCGTACCTGGCTCCTTCT | 4929 |
| 3434 | GCCGTACCTGGCTCCTTCTG | 4930 |
| 3435 | CCGTACCTGGCTCCTTCTGA | 4931 |
| 3436 | CGTACCTGGCTCCTTCTGAT | 4932 |
| 3437 | TGCGTTTGTCCCACCGGCGC | 4860 |
| 3438 | CTGCGTTTGTCCCACCGGCG | 4859 |
| 3439 | GCTGCGTTTGTCCCACCGGC | 4858 |
| 3440 | GGCTGCGTTTGTCCCACCGG | 4857 |
| 3441 | TGGCTGCGTTTGTCCCACCG | 4856 |
| 3442 | CTGGCTGCGTTTGTCCCACC | 4855 |
| 3443 | TCTGGCTGCGTTTGTCCCAC | 4854 |
| 3444 | GTCTGGCTGCGTTTGTCCCA | 4853 |
| 3445 | CGTCTGGCTGCGTTTGTCCC | 4852 |
| 3446 | GCGTCTGGCTGCGTTTGTCC | 4851 |
| 3447 | GGCGTCTGGCTGCGTTTGTC | 4850 |
| 3448 | CGGCGTCTGGCTGCGTTTGT | 4849 |
| 3449 | CCGGCGTCTGGCTGCGTTTG | 4848 |
| 3450 | TCCGGCGTCTGGCTGCGTTT | 4847 |
| 3451 | GTCCGGCGTCTGGCTGCGTT | 4846 |
| 3452 | AGTCCGGCGTCTGGCTGCGT | 4845 |
| 3453 | AAGTCCGGCGTCTGGCTGCG | 4844 |
| 3454 | CAAGTCCGGCGTCTGGCTGC | 4843 |
| 3455 | ACAAGTCCGGCGTCTGGCTG | 4842 |
| 3456 | AACAAGTCCGGCGTCTGGCT | 4841 |
| 3457 | CAACAAGTCCGGCGTCTGGC | 4840 |
| 3458 | CCAACAAGTCCGGCGTCTGG | 4839 |
| 3459 | CCCAACAAGTCCGGCGTCTG | 4838 |
| 3460 | ACCCAACAAGTCCGGCGTCT | 4837 |
| 3461 | CACCCAACAAGTCCGGCGTC | 4836 |
| 3462 | CCACCCAACAAGTCCGGCGT | 4835 |
| 3463 | GCCACCCAACAAGTCCGGCG | 4834 |
| 3464 | CGCCACCCAACAAGTCCGGC | 4833 |
| 3465 | ACGCCACCCAACAAGTCCGG | 4832 |
| 3466 | AACGCCACCCAACAAGTCCG | 4831 |
| 3467 | TAACGCCACCCAACAAGTCC | 4830 |
| 3468 | CTAACGCCACCCAACAAGTC | 4829 |
| 3469 | TCTAACGCCACCCAACAAGT | 4828 |
| 3470 | TTCTAACGCCACCCAACAAG | 4827 |
| 3471 | TTTCTAACGCCACCCAACAA | 4826 |
| 3472 | CTTTCTAACGCCACCCAACA | 4825 |
| 3473 | ACTTTCTAACGCCACCCAAC | 4824 |
| 3474 | TACTTTCTAACGCCACCCAA | 4823 |
| 3475 | TTACTTTCTAACGCCACCCA | 4822 |
| 3476 | GTTACTTTCTAACGCCACCC | 4821 |
| 3477 | AGTTACTTTCTAACGCCACC | 4820 |
| 3478 | GAGTTACTTTCTAACGCCAC | 4819 |
| 3479 | TAACGCCACCCAACAAGTCCGGCG | 4830 |
| 3480 | AACGCCACCCAACAAGTCCG | 4831 |
| 3481 | ACGCCACCCAACAAGTCCGG | 4832 |
| 3482 | CGCCACCCAACAAGTCCGGC | 4833 |
| 3483 | GCCACCCAACAAGTCCGGCG | 4834 |
| 3484 | CCACCCAACAAGTCCGGCGT | 4835 |
| 3485 | CACCCAACAAGTCCGGCGTC | 4836 |
| 3486 | ACCCAACAAGTCCGGCGTCT | 4837 |
| 3487 | CCCAACAAGTCCGGCGTCTG | 4838 |
| 3488 | CCAACAAGTCCGGCGTCTGG | 4839 |
| 3489 | CAACAAGTCCGGCGTCTGGC | 4840 |
| 3490 | AACAAGTCCGGCGTCTGGCT | 4841 |
| 3491 | ACAAGTCCGGCGTCTGGCTG | 4842 |
| 3492 | CAAGTCCGGCGTCTGGCTGC | 4843 |
| 3493 | AAGTCCGGCGTCTGGCTGCG | 4844 |
| 3494 | AGTCCGGCGTCTGGCTGCGT | 4845 |
| 3495 | GTCCGGCGTCTGGCTGCGTT | 4846 |
| 3496 | TCCGGCGTCTGGCTGCGTTT | 4847 |
| 3497 | CCGGCGTCTGGCTGCGTTTG | 4848 |
| 3498 | CGGCGTCTGGCTGCGTTTGT | 4849 |
| 3499 | GGCGTCTGGCTGCGTTTGTC | 4850 |
| 3500 | GCGTCTGGCTGCGTTTGTCC | 4851 |
| 3501 | CGTCTGGCTGCGTTTGTCCC | 4852 |
| 3502 | GTCTGGCTGCGTTTGTCCCA | 4853 |
| 3503 | TCTGGCTGCGTTTGTCCCAC | 4854 |
| 3504 | CTGGCTGCGTTTGTCCCACC | 4855 |
| 3505 | TGGCTGCGTTTGTCCCACCG | 4856 |
| 3506 | GGCTGCGTTTGTCCCACCGG | 4857 |
| 3507 | GCTGCGTTTGTCCCACCGGC | 4858 |
| 3508 | CTGCGTTTGTCCCACCGGCG | 4859 |
| 3509 | TGCGTTTGTCCCACCGGCGC | 4860 |
| 3510 | GCGTTTGTCCCACCGGCGCC | 4861 |
| 3511 | CGTTTGTCCCACCGGCGCCC | 4862 |
| 3512 | GTTTGTCCCACCGGCGCCCC | 4863 |
| 3513 | TTTGTCCCACCGGCGCCCCG | 4864 |
| 3514 | TTGTCCCACCGGCGCCCCGT | 4865 |
| 3515 | TGTCCCACCGGCGCCCCGTA | 4866 |
| 3516 | GTCCCACCGGCGCCCCGTAA | 4867 |
| 3517 | TCCCACCGGCGCCCCGTAAC | 4868 |
| 3518 | CCCACCGGCGCCCCGTAACC | 4869 |
| 3519 | CCACCGGCGCCCCGTAACCT | 4870 |
| 3520 | CACCGGCGCCCCGTAACCTC | 4871 |
| 3521 | ACCGGCGCCCCGTAACCTCT | 4872 |
| 3522 | CCGGCGCCCCGTAACCTCTT | 4873 |
| 3523 | CGGCGCCCCGTAACCTCTTT | 4874 |
| 3524 | GGCGCCCCGTAACCTCTTTT | 4875 |
| 3525 | GCGCCCCGTAACCTCTTTTT | 4876 |
| 3526 | CGCCCCGTAACCTCTTTTTC | 4877 |
| 3527 | GCCCCGTAACCTCTTTTTCC | 4878 |
| 3528 | CCCCGTAACCTCTTTTTCCG | 4879 |
| 3529 | CCCGTAACCTCTTTTTCCGG | 4880 |
| 3530 | CCGTAACCTCTTTTTCCGGC | 4881 |
| 3531 | CGTAACCTCTTTTTCCGGCG | 4882 |
| 3532 | GTAACCTCTTTTTCCGGCGC | 4883 |
| 3533 | TAACCTCTTTTTCCGGCGCG | 4884 |
| 3534 | AACCTCTTTTTCCGGCGCGT | 4885 |
| 3535 | ACCTCTTTTTCCGGCGCGTG | 4886 |
| 3536 | CCTCTTTTTCCGGCGCGTGC | 4887 |
| 3537 | CTCTTTTTCCGGCGCGTGCG | 4888 |
| 3538 | TCTTTTTCCGGCGCGTGCGT | 4889 |
| 3539 | CTTTTTCCGGCGCGTGCGTC | 4890 |
| 3540 | TTTTTCCGGCGCGTGCGTCA | 4891 |
| 3541 | TTTTCCGGCGCGTGCGTCAC | 4892 |
| 3542 | TTTCCGGCGCGTGCGTCACA | 4893 |
| 3543 | TTCCGGCGCGTGCGTCACAC | 4894 |
| 3544 | TCCGGCGCGTGCGTCACACG | 4895 |
| 3545 | CCGGCGCGTGCGTCACACGC | 4896 |
| 3546 | CGGCGCGTGCGTCACACGCT | 4897 |
| 3547 | GGCGCGTGCGTCACACGCTC | 4898 |
| 3548 | GCGCGTGCGTCACACGCTCT | 4899 |
| 3549 | CGCGTGCGTCACACGCTCTC | 4900 |
| 3550 | GCGTGCGTCACACGCTCTCT | 4901 |
| 3551 | CGTGCGTCACACGCTCTCTC | 4902 |
| 3552 | GTGCGTCACACGCTCTCTCC | 4903 |
| 3553 | TGCGTCACACGCTCTCTCCT | 4904 |
| 3554 | GCGTCACACGCTCTCTCCTG | 4905 |
| 3555 | CGTCACACGCTCTCTCCTGG | 4906 |
| 3556 | GTCACACGCTCTCTCCTGGG | 4907 |
| 3557 | TCACACGCTCTCTCCTGGGG | 4908 |
| 3558 | CACACGCTCTCTCCTGGGGT | 4909 |
| 3559 | ACACGCTCTCTCCTGGGGTC | 4910 |
| 3560 | CACGCTCTCTCCTGGGGTCG | 4911 |
| 3561 | ACGCTCTCTCCTGGGGTCGC | 4912 |
| 3562 | CGCTCTCTCCTGGGGTCGCC | 4913 |
| 3563 | GCTCTCTCCTGGGGTCGCCG | 4914 |
| 3564 | CTCTCTCCTGGGGTCGCCGT | 4915 |
| 3565 | TCTCTCCTGGGGTCGCCGTA | 4916 |
| 3566 | CTCTCCTGGGGTCGCCGTAC | 4917 |
| 3567 | TCTCCTGGGGTCGCCGTACC | 4918 |
| 3568 | CTCCTGGGGTCGCCGTACCT | 4919 |
| 3569 | TCCTGGGGTCGCCGTACCTG | 4920 |
| 3570 | CCTGGGGTCGCCGTACCTGG | 4921 |
| 3571 | CTGGGGTCGCCGTACCTGGC | 4922 |
| 3572 | TGGGGTCGCCGTACCTGGCT | 4923 |
| 3573 | GGGGTCGCCGTACCTGGCTC | 4924 |
| 3574 | GGGTCGCCGTACCTGGCTCC | 4925 |
| 3575 | GGTCGCCGTACCTGGCTCCT | 4926 |
| 3576 | GTCGCCGTACCTGGCTCCTT | 4927 |
| 3577 | TCGCCGTACCTGGCTCCTTC | 4928 |
| 3578 | CGCCGTACCTGGCTCCTTCT | 4929 |
| 3579 | GCCGTACCTGGCTCCTTCTG | 4930 |
| 3580 | CCGTACCTGGCTCCTTCTGA | 4931 |
| 3581 | CGTACCTGGCTCCTTCTGAT | 4932 |
| 3582 | CTAACGCCACCCAACAAGTC | 4829 |
| 3583 | TCTAACGCCACCCAACAAGT | 4828 |
| 3584 | TTCTAACGCCACCCAACAAG | 4827 |
| 3585 | TTTCTAACGCCACCCAACAA | 4826 |
| 3586 | CTTTCTAACGCCACCCAACA | 4825 |
| 3587 | ACTTTCTAACGCCACCCAAC | 4824 |
| 3588 | TACTTTCTAACGCCACCCAA | 4823 |
| 3589 | TTACTTTCTAACGCCACCCA | 4822 |
| 3590 | GTTACTTTCTAACGCCACCC | 4821 |
| 3591 | AGTTACTTTCTAACGCCACC | 4820 |
| 3592 | GAGTTACTTTCTAACGCCAC | 4819 |

```
Hot Zones (Relative upstream location to gene start site)
  1-500
  950-1400
1450-1800
3390-4050
4300-5000
```

### Examples

Genetic Code (5′ Upstream Region)

(SEQ ID NO: 11964)

AACTCCCATCCGTGATTGTTCCCTCCCCAGAGACCCCGGTAACATTCCCG
GGTAACAAGATGCCCCTGGTTATCAAATTCCCCTAGCTCTTGAGGCTGGC
TGGACGTTATCCCTCAGAGGGGGATGAGCATGGCAAATTGGGACTTGTTA
TTCTGAAGGATTCGTGGGTCCTGTGAACTCTAATTACTTTGAAATGGGTC
TAGGTTGTGAGATGTCTCAGAGCACTTTAGCTCAGCTGTTATTACTGTTT
CTAAAGGCCACATAAAGGGACTCTGATGGGAGACATTCCTCATGGAGGAT
TCAATTCTATAACATTTCTCTCAATAAAGGCTGGTAAATAGACCTTCATT
AAAGGAACCAAGAATTTAAATTTCTAGGACTCAGAGGGGTGGGGTCCTAT
ACCCAGTCAGAGATCCTACCTAGAGCCTAGACCAAGAGAAAAACACAGAT
GGTCTCTCAAACTGATTTGATCTGACTTCGCAGGTCATTAGATATAGAAT
CTCCGAAAAAGGTGGATGCTGAGAGACATAGACAGTTCCTACACTTTAAG
AAATCTCCATCTTGAGGTCTCAAATTGAGAAAGACTTAACAGACCCATGA
GAGTTACAGATCCCTAATAACCTGGGCTAAATAATCCATGTCTGCCGGGC
GCAGTGGCTCACGCCTGTAATCCCAGCACTTTGGGAGGCCGAGGTGGGCG
GATCACCTGAGGTCGGGAGTTCGAGACCAACCTGACCAATATGGAGAAAC
CCCGTCTCCACTAAAAATACAAAATTAGCCGGGCCTGGTGACGGGAGCCT
GTAATCCCAGCTACTTGGGAGGCTGAGGCAGGAGAATCATTTGAACCTGG
GAGGCGGAGGTTGCAGTGAGCCGAGATGGCACCATTGCACTCCAGCCTGG
TCAGTAAGAGCGAAACTCCGTCTCAAAAAAAAGAAAAAAAAAAAGAAAAG
AAAAAAGGATACTGTGAGGAGACACAAGAGCATCCATGACATAGATTATT
TAGCTCAGCTGTAATTACTGTTTCTAATACAGTAATATTAGATGGTGATC
TGCCTGCCTCGGCCTCCCAAAGTTCTGGGATTACAGGTGTGAGCCACCGC
GCCCAGCCTTTTTTTTTTTTTTTTTTTGAGACAGGATCTCACTCTGTTGC
CCATGCTTAAGCGCATTGGCCCTCTCACTCACTGTAGCCTCAACCTCCTG
GGCTCAAGCGATCCTCCCACTTCAGCCTCCCAACTAGCTGTAACTACAGG
CACTGGCCACCAAACCCAGATAATTTTTTTTTTCCTGTAGAGGTGGGGTT
TTGCCACGTTACCCAGGCTGGTCTTGAACTCTTAAGCTCAAGCGATCCTC
CTGCCTCGGCCCCCCAAAGTTCTGGGATTACAGGCATGAGCCACCATACC
TGGCGTACAGTATCCAGTGTAATGCAGTGATTAAAAATTCAGGATCCAGA
CCGGGATGGTGGCTTGTGCCTGTAGTCCCAGGGGTGGAGGTTGCAGTGAA
CGGAAATGGTGCCACTGCATTCCAGCCTGGGTGACAGAGTGAGACCCTGT
CTCAACAAAACCCCCCAAAAACCAAGAACAAAAAAGAATGCAGGATCTGA
TGCTAGATTGTCTGCATTAGAACTCTAGCCACTTAAGCTGGGTGTGGTGG
CTCATGCCTGTAATCCCAGCACTTTTGGAGGCCGCAGGCGGGTGGATCAC
CTGAGATTGGGAGTTCAAGACCAGCCTGACCAACATGGAGAAACCCTGTT
TCTACTAAAAATACAAAATTAGCCACCGGGCATGGTGGTGCATGCCTGTA
ATCCCAGCTACTTGGGAGGCTGAGGCAGGAGAATCACTTGAACCCGGGAG
GCAGAGGTTACGGTGAGATGAGATGGCACCATTGCACTCCAGCCTGGGCA
ACAAGAGCGAAACTCCATCTCAAAAAAAAAAAAAAAAAAAAAGGAATTCT
AGCCACTTAGAAGCTCTGTGATCTTGGGCAAATTGCTTATCTTTGCACCT
CAGCCTCCTCCTCTGTAATATAGGGTAATAGTATCTACCTTAAAGGGTTG
TTGTGAAAATTAAATAGTTTAGTACATGTAAAGTGCTTAGACAAAGTATT
TGGCATTAAGCGAGAGTTGGATATATTAGCCATCATTATTAACCACCTGG
GGGAACTTCAACTGATTTGGAGTCTAGGCATACAACTGGAAAGACCTGCC
TAGGAGTGTCTTGTGAATGCGATTTGCATAACGGTTTAGGCCCAGCTGAC
GTCAAGGGCTCCTTATAGCTCCAGGTCAGTTGTAGCCCTGGATGTAGTTC
CTGCCACGCAACAGTCCCACAATCTCCCCACCAACCCTTCTTCCTACCCA
ACTCCTGCAGCACCAGGAAGTGAAACAAAGAGGCAGAGCCCTGTGCCTCC
AACTCACCCTTGTCCCTCTCATCCCATCCCCCAGGCTCTACTTCCTCCTC
CTTTTCATCTTTCTTTCATCTCTTATCTTTTAGGGCTCCCAGAATGGGGA
CCAGAGATGGGAAGAACATAGGAGACGTTGTACACAAGTAAGGTGAACTC
CCTATCCTGCCCCCTCCCCTTTCCTTATTCCATTGGTGTCCACCTTATTA
GGGAGAGAGGCAAAACAGTTCTCACCCAAACTCAGATAATTCTCTGATGC
TGGAAATGTTTAATCTAAAGGGTAGATTTCCATTTTTTTTTTTTTTTTTT
TGAGACAGAGTCTTGCTCTGTCACCCAGGCTGGAGTGCAGTGGCGCCATC
TCGGCTCACTGCAACCTCTGCCTCCTGGCTTCAAGCGATTCTCTTGCCTC
AGCCTCCCGAGTAGCTGGGACTATAGGCGCCCACCACCGTGCTGGCTCAT
TTTTGTATTTTTAGTAGAGACAGGATTTCACCATGATGGCCAGGCTGGTC
TCGAACTCCTGACCTCATGATCCGCCTGCCTCGGCCTCCCAAAGTACTGG
GATTACAGGCGTGAGCCACTGTACCCGGCCCTTGGTAGATTTAACTTAGA
ATCGTAATATTTTTTTTTCTTCTCTTAGCTCATACCTACAGAATCATAAT
ATTTGAACCAGAAGTGTCATTGGGCAGTTTTGAATAGCTCTAAGGGAAGG
GAGACCTCCATTCAGGACAAGTTTCTCAGAAGAAAAGGGTCAACCTCTTG
GGGGAGGCTTTGGGAGCCAGCTGTGTGGTCACCGATGGCCTCATTCTGAC
GTCTTCGAAATTGTTCTGGGACCCTCCACTGGGGTCGGGGCAGTCCCGGC
TTTGGACCACCTTCCACTCCCACGCCCAACCTCACACTCTTAGCTGTTTC
ACTCGATGTTGCATCATGGAGGGTGATGAAATCGGTGTCAGTGGATTTTA
CCCATGGATGCAACAAGCTGAAGGACCAGCCAGAGTCATTGACAGTGCAC
CTTCGACTACCCAGAACTCCTGGGCTTCCTAGCCATGGGGTCCAAAGCTG
GGACTGCCCCGACCCCAGTGGAGGGTCCCAGAACAATTTGGATGACGTCA
GAATGAGGCCATGGGACTAGGTGCTGGAATGTCTAAGTTGAACTTCCAGG
CCTTATTTGCACTAGTCCTGAAAAAAACATCATCCAACTCTTATAGAGCC
TATGAAATCTTGGGCCACTAGGGTTGAGGAGTCAGGTGGTTCTTAGTCAA
TAACCCTCTTCCCACAAGAGCCTTTCTAACCTCCACTGTGAGGCCTGAAA
TGGGGAGCAATAAGACCTCATACTGGCTTCCCAGTTCTCCAAGTTCCTTC
ATGCGCATTCTCTCCCATGAAACCAGGACCATCCAGTTGAAATAATGTTG
TTTCCAACTGAGAAAAAGAAGCCCGTTTATTCCTAATAGGGGGCATCAGG
TAGGAATCAAACTTCATTGCAAACAGCTCACCATCCTATTGGGAGATGAA
TGGATGTTTCTCTGTTTTGCTTTTTCCTCAAGCAGGAGGAAGTGAGGAAA
TTAGGTTTGGGGTGGGGTAGGGGTATAGCTTTGAGAGGCAAAAAGATCAG
GGAAAGATCAAACAGGAAGGAACTTGAGACCAGATTAATTTAAATATTTG
TTCTCCCTTACCCCTCCCACCCCATCCCCGCTGTGCCCCCCATCCCCGCC
CCTTCTATAGCTATTTCGATTCCTGGAGAGCATTACACATGTGTCCCATC
CCAGGCCTCTAGCCACAGCAACCACACTACTCATTTCCCCTGGAACTGAG
GCTGCATACCTGGGCTCCCCACAGAGGGGGATGATGCAGGGAGGGGAATC
CCACCTGCTGTGAGTCACCTGCTGGTATAAAGGGCGGGCCTTACAATGCA
GGGACCTTAAAAGACTCAGAGACAAAGGGAGAAAAACAACAGGAAGCAGC
TTACAAACTCGGTGAACAACTGAGGGAACCAAACCAGAGACGCGCTGAAC
AGAGAGAATCAGGCTCAAAGCAAGTGGAAGTGGGCAGAGATTCCACCAGG
ACTGGTGCAAGGCGCAGAGCCAGCCAGATTTGAGAAGAAGGCAAAAAG
ATG

[0358] 16) AKT. Akt (Protein kinase B, PKB) is a serine/threonine kinase is an important node several signaling cascades downstream of growth factor receptor tyrosine kinases. Akt plays an essential role in cell survival and altered activity has been associated with cancer and other disease conditions, such as diabetes mellitus, neurodegenerative diseases, and muscle hypotrophy. AKT plays a key role in regulating tumor formation, cell survival, insulin signaling and metabolism (lipid and glucose), growth, migration, proliferation, polarity, cell cycle progression, muscle and cardiomyocyte contractility, angiogenesis, and self-renewal of stem cells (reviewed by Liao and Hung, Am J Transl Res. 2010; 2(1): 19-42). Akt is a downstream mediator of the PI 3-K pathway, resulting in the recruitment of Akt to the plasma membrane via the PH (plexstrin homology domain) of Akt. Akt is fully activated by phosphorylation at two key sites: Ser308 (phosphorylated by PDK1) and Thr478 (phosphorylated by mTOR and DNA-PK). Akt can then phosphorylated a wide range of substrates including transcription factors (e.g. FOXO1), kinases (GSK-3, Raf-1, ASK, Chk1) and other proteins with important signaling roles (e.g. Bad, MDM2).

[0359] Protein: AKT1 Gene: AKT1 (Homo sapiens, chromosome 14, 105235686-105262080 [NCBI Reference Sequence: NC_{—}000014.8]; start site location: 105258980; strand: negative)

Gene Identification

| | |
|---|---|
| GeneID | 207 |
| HGNC | 391 |
| HPRD | 01261 |
| MIM | 164730 |

Targeted Sequences

| | | | Relative |
|---|---|---|---|
| | | | upstream |
| | | | location |
| | | | to gene |
| Sequence | Design | | start |
| ID No: | ID | Sequence (5′-3′) | site |
| 3593 | | GAGGCTCCCGCGACGCTCACGCG | 8 |
| 3646 | | TACCGGGCGTCTCAGGTTTTGCC | 843 |
| 3669 | | TCCGAGCCGCGCACGCCTCAGGC | 1562 |
| 3703 | | CACCAACGGACTCCGTCCGCCC | 2010 |
| 3770 | | CCGCCGGCTGCCTCGCTGGCCCAGCG | 2464 |
| 3927 | | TCTCGGGTCCCGGCCTCGCCCGGCGG | 2556 |
| | | AGC | |
| 4084 | | CATTCTGGCGGCGCCGCGGCTCGCG | 2730 |
| 4228 | | CACCGGGCCGCCGCGTCCGGGCGCG | 2838 |
| 4338 | AKT4 | CACATCCGCCTCCGCCGCCCGG | 3160 |

Targeted Shift Sequences

| | | Relative |
|---|---|---|
| | | upstream |
| | | location |
| Sequence | | to gene |
| ID No: | Sequence (5′-3′) | start site |
| 3593 | GAGGCTCCCGCGACGCTCACGCG | 8 |
| 3594 | AGGCTCCCGCGACGCTCACG | 9 |
| 3595 | GGCTCCCGCGACGCTCACGC | 10 |
| 3596 | GCTCCCGCGACGCTCACGCG | 11 |
| 3597 | CTCCCGCGACGCTCACGCGC | 12 |
| 3598 | TCCCGCGACGCTCACGCGCT | 13 |
| 3599 | CCCGCGACGCTCACGCGCTC | 14 |
| 3600 | CCGCGACGCTCACGCGCTCC | 15 |
| 3601 | CGCGACGCTCACGCGCTCCT | 16 |
| 3602 | GCGACGCTCACGCGCTCCTC | 17 |
| 3603 | CGACGCTCACGCGCTCCTCT | 18 |
| 3604 | GACGCTCACGCGCTCCTCTC | 19 |
| 3605 | ACGCTCACGCGCTCCTCTCA | 20 |
| 3606 | CGCTCACGCGCTCCTCTCAG | 21 |
| 3607 | GCTCACGCGCTCCTCTCAGG | 22 |
| 3608 | CTCACGCGCTCCTCTCAGGC | 23 |
| 3609 | TCACGCGCTCCTCTCAGGCT | 24 |
| 3610 | CACGCGCTCCTCTCAGGCTG | 25 |
| 3611 | ACGCGCTCCTCTCAGGCTGG | 26 |
| 3612 | CGCGCTCCTCTCAGGCTGGC | 27 |
| 3613 | GCGCTCCTCTCAGGCTGGCG | 28 |
| 3614 | CGCTCCTCTCAGGCTGGCGC | 29 |
| 3615 | GCTCCTCTCAGGCTGGCGCT | 30 |
| 3616 | CTCCTCTCAGGCTGGCGCTC | 31 |
| 3617 | TCCTCTCAGGCTGGCGCTCC | 32 |
| 3618 | CCTCTCAGGCTGGCGCTCCC | 33 |
| 3619 | CTCTCAGGCTGGCGCTCCCC | 34 |
| 3620 | TCTCAGGCTGGCGCTCCCCG | 35 |
| 3621 | CTCAGGCTGGCGCTCCCCGA | 36 |
| 3622 | TCAGGCTGGCGCTCCCCGAG | 37 |
| 3623 | CAGGCTGGCGCTCCCCGAGC | 38 |
| 3624 | AGGCTGGCGCTCCCCGAGCC | 39 |
| 3625 | GGCTGGCGCTCCCCGAGCCC | 40 |
| 3626 | GCTGGCGCTCCCCGAGCCCA | 41 |
| 3627 | CTGGCGCTCCCCGAGCCCAG | 42 |
| 3628 | TGGCGCTCCCCGAGCCCAGC | 43 |
| 3629 | GGCGCTCCCCGAGCCCAGCT | 44 |
| 3630 | GCGCTCCCCGAGCCCAGCTG | 45 |
| 3631 | CGCTCCCCGAGCCCAGCTGG | 46 |
| 3632 | GCTCCCCGAGCCCAGCTGGC | 47 |
| 3633 | CTCCCCGAGCCCAGCTGGCC | 48 |
| 3634 | TCCCCGAGCCCAGCTGGCCT | 49 |
| 3635 | CCCCGAGCCCAGCTGGCCTG | 50 |
| 3636 | CCCGAGCCCAGCTGGCCTGG | 51 |
| 3637 | CCGAGCCCAGCTGGCCTGGC | 52 |
| 3638 | CGAGCCCAGCTGGCCTGGCC | 53 |
| 3639 | CGAGGCTCCCGCGACGCTCA | 7 |
| 3640 | CCGAGGCTCCCGCGACGCTC | 6 |
| 3641 | CCCGAGGCTCCCGCGACGCT | 5 |
| 3642 | GCCCGAGGCTCCCGCGACGC | 4 |
| 3643 | TGCCCGAGGCTCCCGCGACG | 3 |
| 3644 | GTGCCCGAGGCTCCCGCGAC | 2 |
| 3645 | GGTGCCCGAGGCTCCCGCGA | 1 |
| 3646 | TACCGGGCGTCTCAGGTTTTGCC | 843 |
| 3647 | ACCGGGCGTCTCAGGTTTTG | 844 |
| 3648 | CCGGGCGTCTCAGGTTTTGC | 845 |
| 3649 | CGGGCGTCTCAGGTTTTGCC | 846 |
| 3650 | GGGCGTCTCAGGTTTTGCCA | 847 |
| 3651 | GGCGTCTCAGGTTTTGCCAG | 848 |
| 3652 | GCGTCTCAGGTTTTGCCAGG | 849 |
| 3653 | CGTCTCAGGTTTTGCCAGGC | 850 |
| 3654 | GTACCGGGCGTCTCAGGTTT | 842 |
| 3655 | TGTACCGGGCGTCTCAGGTT | 841 |
| 3656 | ATGTACCGGGCGTCTCAGGT | 840 |
| 3657 | CATGTACCGGGCGTCTCAGG | 839 |
| 3658 | ACATGTACCGGGCGTCTCAG | 838 |
| 3659 | AACATGTACCGGGCGTCTCA | 837 |
| 3660 | CAACATGTACCGGGCGTCTC | 836 |
| 3661 | CCAACATGTACCGGGCGTCT | 835 |
| 3662 | GCCAACATGTACCGGGCGTC | 834 |
| 3663 | GGCCAACATGTACCGGGCGT | 833 |
| 3664 | TGGCCAACATGTACCGGGCG | 832 |
| 3665 | TTGGCCAACATGTACCGGGC | 831 |
| 3666 | TTTGGCCAACATGTACCGGG | 830 |
| 3667 | ATTTGGCCAACATGTACCGG | 829 |
| 3668 | CATTTGGCCAACATGTACCG | 828 |
| 3669 | TCCGAGCCGCGCACGCCTCAGGC | 1562 |
| 3670 | CCGAGCCGCGCACGCCTCAG | 1563 |
| 3671 | CGAGCCGCGCACGCCTCAGG | 1564 |
| 3672 | GAGCCGCGCACGCCTCAGGC | 1565 |
| 3673 | AGCCGCGCACGCCTCAGGCA | 1566 |
| 3674 | GCCGCGCACGCCTCAGGCAC | 1567 |
| 3675 | CCGCGCACGCCTCAGGCACA | 1568 |
| 3676 | CGCGCACGCCTCAGGCACAG | 1569 |
| 3677 | GCGCACGCCTCAGGCACAGG | 1570 |
| 3678 | CGCACGCCTCAGGCACAGGG | 1571 |
| 3679 | GCACGCCTCAGGCACAGGGG | 1572 |
| 3680 | CACGCCTCAGGCACAGGGGG | 1573 |
| 3681 | ACGCCTCAGGCACAGGGGGC | 1574 |
| 3682 | CGCCTCAGGCACAGGGGGCT | 1575 |
| 3683 | CTCCGAGCCGCGCACGCCTC | 1561 |
| 3684 | GCTCCGAGCCGCGCACGCCT | 1560 |
| 3685 | GGCTCCGAGCCGCGCACGCC | 1559 |
| 3686 | GGGCTCCGAGCCGCGCACGC | 1558 |
| 3687 | AGGGCTCCGAGCCGCGCACG | 1557 |
| 3688 | CAGGGCTCCGAGCCGCGCAC | 1556 |
| 3689 | GCAGGGCTCCGAGCCGCGCA | 1555 |
| 3690 | GGCAGGGCTCCGAGCCGCGC | 1554 |
| 3691 | GGGCAGGGCTCCGAGCCGCG | 1553 |
| 3692 | AGGGCAGGGCTCCGAGCCGC | 1552 |
| 3693 | GAGGGCAGGGCTCCGAGCCG | 1551 |
| 3694 | CGAGGGCAGGGCTCCGAGCC | 1550 |
| 3695 | CCGAGGGCAGGGCTCCGAGC | 1549 |
| 3696 | TCCGAGGGCAGGGCTCCGAG | 1548 |
| 3697 | CTCCGAGGGCAGGGCTCCGA | 1547 |
| 3698 | ACTCCGAGGGCAGGGCTCCG | 1546 |
| 3699 | GACTCCGAGGGCAGGGCTCC | 1545 |
| 3700 | GGACTCCGAGGGCAGGGCTC | 1544 |
| 3701 | AGGACTCCGAGGGCAGGGCT | 1543 |
| 3702 | CAGGACTCCGAGGGCAGGGC | 1542 |
| 3703 | CACCAACGGACTCCGTCCGCCC | 2010 |
| 3704 | ACCAACGGACTCCGTCCGCC | 2011 |
| 3705 | CCAACGGACTCCGTCCGCCC | 2012 |
| 3706 | CAACGGACTCCGTCCGCCCT | 2013 |
| 3707 | AACGGACTCCGTCCGCCCTT | 2014 |
| 3708 | ACGGACTCCGTCCGCCCTTC | 2015 |
| 3709 | CGGACTCCGTCCGCCCTTCG | 2016 |
| 3710 | GGACTCCGTCCGCCCTTCGC | 2017 |
| 3711 | GACTCCGTCCGCCCTTCGCT | 2018 |
| 3712 | ACTCCGTCCGCCCTTCGCTC | 2019 |
| 3713 | CTCCGTCCGCCCTTCGCTCG | 2020 |
| 3714 | TCCGTCCGCCCTTCGCTCGG | 2021 |
| 3715 | CCGTCCGCCCTTCGCTCGGA | 2022 |
| 3716 | CGTCCGCCCTTCGCTCGGAT | 2023 |
| 3717 | GTCCGCCCTTCGCTCGGATG | 2024 |
| 3718 | TCCGCCCTTCGCTCGGATGA | 2025 |
| 3719 | CCGCCCTTCGCTCGGATGAG | 2026 |
| 3720 | CGCCCTTCGCTCGGATGAGG | 2027 |
| 3721 | GCCCTTCGCTCGGATGAGGG | 2028 |
| 3722 | CCCTTCGCTCGGATGAGGGA | 2029 |
| 3723 | CCTTCGCTCGGATGAGGGAC | 2030 |
| 3724 | CTTCGCTCGGATGAGGGACT | 2031 |
| 3725 | TTCGCTCGGATGAGGGACTC | 2032 |
| 3726 | TCGCTCGGATGAGGGACTCA | 2033 |
| 3727 | CGCTCGGATGAGGGACTCAA | 2034 |
| 3728 | GCTCGGATGAGGGACTCAAA | 2035 |
| 3729 | CTCGGATGAGGGACTCAAAG | 2036 |
| 3730 | TCGGATGAGGGACTCAAAGC | 2037 |
| 3731 | CCACCAACGGACTCCGTCCG | 2009 |
| 3732 | CCCACCAACGGACTCCGTCC | 2008 |
| 3733 | CCCCACCAACGGACTCCGTC | 2007 |
| 3734 | CCCCCACCAACGGACTCCGT | 2006 |
| 3735 | ACCCCCACCAACGGACTCCG | 2005 |
| 3736 | GACCCCCACCAACGGACTCC | 2004 |
| 3737 | GGACCCCCACCAACGGACTC | 2003 |
| 3738 | CGGACCCCCACCAACGGACT | 2002 |
| 3739 | CCGGACCCCCACCAACGGAC | 2001 |
| 3740 | ACCGGACCCCCACCAACGGA | 2000 |
| 3741 | AACCGGACCCCCACCAACGG | 1999 |
| 3742 | CAACCGGACCCCCACCAACG | 1998 |
| 3743 | GCAACCGGACCCCCACCAAC | 1997 |
| 3744 | GGCAACCGGACCCCCACCAA | 1996 |
| 3745 | AGGCAACCGGACCCCCACCA | 1995 |
| 3746 | GAGGCAACCGGACCCCCACC | 1994 |
| 3747 | AGAGGCAACCGGACCCCCAC | 1993 |
| 3748 | GAGAGGCAACCGGACCCCCA | 1992 |
| 3749 | GGAGAGGCAACCGGACCCCC | 1991 |
| 3750 | GGGAGAGGCAACCGGACCCC | 1990 |
| 3751 | CGGGAGAGGCAACCGGACCC | 1989 |
| 3752 | CCGGGAGAGGCAACCGGACC | 1988 |
| 3753 | CCCGGGAGAGGCAACCGGAC | 1987 |
| 3754 | TCCCGGGAGAGGCAACCGGA | 1986 |
| 3755 | CTCCCGGGAGAGGCAACCGG | 1985 |
| 3756 | GCTCCCGGGAGAGGCAACCG | 1984 |
| 3757 | AGCTCCCGGGAGAGGCAACC | 1983 |
| 3758 | CAGCTCCCGGGAGAGGCAAC | 1982 |
| 3759 | ACAGCTCCCGGGAGAGGCAA | 1981 |
| 3760 | CACAGCTCCCGGGAGAGGCA | 1980 |
| 3761 | ACACAGCTCCCGGGAGAGGC | 1979 |
| 3762 | TACACAGCTCCCGGGAGAGG | 1978 |
| 3763 | CTACACAGCTCCCGGGAGAG | 1977 |
| 3764 | TCTACACAGCTCCCGGGAGA | 1976 |
| 3765 | GTCTACACAGCTCCCGGGAG | 1975 |
| 3766 | AGTCTACACAGCTCCCGGGA | 1974 |
| 3767 | AAGTCTACACAGCTCCCGGG | 1973 |
| 3768 | GAAGTCTACACAGCTCCCGG | 1972 |
| 3769 | AGAAGTCTACACAGCTCCCG | 1971 |
| 3770 | CCGCCGGCTGCCTCGCTGGCCCAGCG | 2464 |
| 3771 | CGCCGGCTGCCTCGCTGGCC | 2465 |
| 3772 | GCCGGCTGCCTCGCTGGCCC | 2466 |
| 3773 | CCGGCTGCCTCGCTGGCCCA | 2467 |
| 3774 | CGGCTGCCTCGCTGGCCCAG | 2468 |
| 3775 | GGCTGCCTCGCTGGCCCAGC | 2469 |
| 3776 | GCTGCCTCGCTGGCCCAGCG | 2470 |
| 3777 | CTGCCTCGCTGGCCCAGCGC | 2471 |
| 3778 | TGCCTCGCTGGCCCAGCGCC | 2472 |
| 3779 | GCCTCGCTGGCCCAGCGCCC | 2473 |
| 3780 | CCTCGCTGGCCCAGCGCCCG | 2474 |
| 3781 | CTCGCTGGCCCAGCGCCCGG | 2475 |
| 3782 | TCGCTGGCCCAGCGCCCGGG | 2476 |
| 3783 | CGCTGGCCCAGCGCCCGGGG | 2477 |
| 3784 | GCTGGCCCAGCGCCCGGGGA | 2478 |
| 3785 | CTGGCCCAGCGCCCGGGGAG | 2479 |
| 3786 | TGGCCCAGCGCCCGGGGAGC | 2480 |
| 3787 | GGCCCAGCGCCCGGGGAGCC | 2481 |
| 3788 | GCCCAGCGCCCGGGGAGCCC | 2482 |
| 3789 | CCCAGCGCCCGGGGAGCCCC | 2483 |
| 3790 | CCAGCGCCCGGGGAGCCCCA | 2484 |
| 3791 | CAGCGCCCGGGGAGCCCCAC | 2485 |
| 3792 | AGCGCCCGGGGAGCCCCACG | 2486 |
| 3793 | GCGCCCGGGGAGCCCCACGG | 2487 |
| 3794 | CGCCCGGGGAGCCCCACGGC | 2488 |
| 3795 | GCCCGGGGAGCCCCACGGCC | 2489 |
| 3796 | CCCGGGGAGCCCCACGGCCC | 2490 |
| 3797 | CCGGGGAGCCCCACGGCCCG | 2491 |
| 3798 | CGGGGAGCCCCACGGCCCGC | 2492 |
| 3799 | GGGGAGCCCCACGGCCCGCA | 2493 |
| 3800 | GGGAGCCCCACGGCCCGCAG | 2494 |
| 3801 | GGAGCCCCACGGCCCGCAGG | 2495 |
| 3802 | GAGCCCCACGGCCCGCAGGG | 2496 |
| 3803 | AGCCCCACGGCCCGCAGGGG | 2497 |
| 3804 | GCCCCACGGCCCGCAGGGGC | 2498 |
| 3805 | CCCCACGGCCCGCAGGGGCA | 2499 |
| 3806 | CCCACGGCCCGCAGGGGCAC | 2500 |
| 3807 | CCACGGCCCGCAGGGGCACC | 2501 |
| 3808 | CACGGCCCGCAGGGGCACCC | 2502 |
| 3809 | ACGGCCCGCAGGGGCACCCC | 2503 |
| 3810 | CGGCCCGCAGGGGCACCCCG | 2504 |
| 3811 | GGCCCGCAGGGGCACCCCGA | 2505 |
| 3812 | GCCCGCAGGGGCACCCCGAG | 2506 |
| 3813 | CCCGCAGGGGCACCCCGAGC | 2507 |
| 3814 | CCGCAGGGGCACCCCGAGCC | 2508 |
| 3815 | CGCAGGGGCACCCCGAGCCC | 2509 |
| 3816 | GCAGGGGCACCCCGAGCCCC | 2510 |
| 3817 | CAGGGGCACCCCGAGCCCCA | 2511 |
| 3818 | AGGGGCACCCCGAGCCCCAG | 2512 |
| 3819 | GGGGCACCCCGAGCCCCAGC | 2513 |
| 3820 | GGGCACCCCGAGCCCCAGCT | 2514 |
| 3821 | GGCACCCCGAGCCCCAGCTC | 2515 |
| 3822 | GCACCCCGAGCCCCAGCTCC | 2516 |
| 3823 | CACCCCGAGCCCCAGCTCCA | 2517 |
| 3824 | ACCCCGAGCCCCAGCTCCAG | 2518 |
| 3825 | CCCCGAGCCCCAGCTCCAGG | 2519 |
| 3826 | CCCGAGCCCCAGCTCCAGGC | 2520 |
| 3827 | CCGAGCCCCAGCTCCAGGCC | 2521 |
| 3828 | CGAGCCCCAGCTCCAGGCCC | 2522 |
| 3829 | GAGCCCCAGCTCCAGGCCCG | 2523 |
| 3830 | AGCCCCAGCTCCAGGCCCGG | 2524 |
| 3831 | GCCCCAGCTCCAGGCCCGGC | 2525 |
| 3832 | CCCCAGCTCCAGGCCCGGCG | 2526 |
| 3833 | CCCAGCTCCAGGCCCGGCGG | 2527 |
| 3834 | CCAGCTCCAGGCCCGGCGGC | 2528 |
| 3835 | CAGCTCCAGGCCCGGCGGCG | 2529 |
| 3836 | AGCTCCAGGCCCGGCGGCGT | 2530 |
| 3837 | GCTCCAGGCCCGGCGGCGTC | 2531 |
| 3838 | CTCCAGGCCCGGCGGCGTCC | 2532 |
| 3839 | TCCAGGCCCGGCGGCGTCCC | 2533 |
| 3840 | CCAGGCCCGGCGGCGTCCCT | 2534 |
| 3841 | CAGGCCCGGCGGCGTCCCTT | 2535 |
| 3842 | AGGCCCGGCGGCGTCCCTTC | 2536 |
| 3843 | GGCCCGGCGGCGTCCCTTCT | 2537 |
| 3844 | GCCCGGCGGCGTCCCTTCTC | 2538 |
| 3845 | CCCGGCGGCGTCCCTTCTCT | 2539 |
| 3846 | CCGGCGGCGTCCCTTCTCTC | 2540 |
| 3847 | CGGCGGCGTCCCTTCTCTCG | 2541 |
| 3848 | GGCGGCGTCCCTTCTCTCGG | 2542 |
| 3849 | GCGGCGTCCCTTCTCTCGGG | 2543 |
| 3850 | CGGCGTCCCTTCTCTCGGGT | 2544 |
| 3851 | GGCGTCCCTTCTCTCGGGTC | 2545 |
| 3852 | GCGTCCCTTCTCTCGGGTCC | 2546 |
| 3853 | CGTCCCTTCTCTCGGGTCCC | 2547 |
| 3854 | GTCCCTTCTCTCGGGTCCCG | 2548 |
| 3855 | TCCCTTCTCTCGGGTCCCGG | 2549 |
| 3856 | CCCTTCTCTCGGGTCCCGGC | 2550 |
| 3857 | CCTTCTCTCGGGTCCCGGCC | 2551 |
| 3858 | CTTCTCTCGGGTCCCGGCCT | 2552 |
| 3859 | TTCTCTCGGGTCCCGGCCTC | 2553 |
| 3860 | TCTCTCGGGTCCCGGCCTCG | 2554 |
| 3861 | CTCTCGGGTCCCGGCCTCGC | 2555 |
| 3862 | TCTCGGGTCCCGGCCTCGCC | 2556 |
| 3863 | CTCGGGTCCCGGCCTCGCCC | 2557 |
| 3864 | TCGGGTCCCGGCCTCGCCCG | 2558 |
| 3865 | CGGGTCCCGGCCTCGCCCGG | 2559 |
| 3866 | GGGTCCCGGCCTCGCCCGGC | 2560 |
| 3867 | GGTCCCGGCCTCGCCCGGCG | 2561 |
| 3868 | GTCCCGGCCTCGCCCGGCGG | 2562 |
| 3869 | TCCCGGCCTCGCCCGGCGGA | 2563 |
| 3870 | CCCGGCCTCGCCCGGCGGAG | 2564 |
| 3871 | CCGGCCTCGCCCGGCGGAGC | 2565 |
| 3872 | CGGCCTCGCCCGGCGGAGCG | 2566 |
| 3873 | GGCCTCGCCCGGCGGAGCGG | 2567 |
| 3874 | GCCTCGCCCGGCGGAGCGGC | 2568 |
| 3875 | CCTCGCCCGGCGGAGCGGCC | 2569 |
| 3876 | CTCGCCCGGCGGAGCGGCCT | 2570 |
| 3877 | TCGCCCGGCGGAGCGGCCTC | 2571 |
| 3878 | CGCCCGGCGGAGCGGCCTCC | 2572 |
| 3879 | GCCCGGCGGAGCGGCCTCCC | 2573 |
| 3880 | CCCGGCGGAGCGGCCTCCCC | 2574 |
| 3881 | CCGGCGGAGCGGCCTCCCCA | 2575 |
| 3882 | CGGCGGAGCGGCCTCCCCAA | 2576 |
| 3883 | GGCGGAGCGGCCTCCCCAAG | 2577 |
| 3884 | GCGGAGCGGCCTCCCCAAGG | 2578 |
| 3885 | CGGAGCGGCCTCCCCAAGGT | 2579 |
| 3886 | GGAGCGGCCTCCCCAAGGTC | 2580 |
| 3887 | GAGCGGCCTCCCCAAGGTCA | 2581 |
| 3888 | AGCGGCCTCCCCAAGGTCAT | 2582 |
| 3889 | GCGGCCTCCCCAAGGTCATG | 2583 |
| 3890 | CGGCCTCCCCAAGGTCATGA | 2584 |
| 3891 | TCCGCCGGCTGCCTCGCTGG | 2463 |
| 3892 | CTCCGCCGGCTGCCTCGCTG | 2462 |
| 3893 | CCTCCGCCGGCTGCCTCGCT | 2461 |
| 3894 | ACCTCCGCCGGCTGCCTCGC | 2460 |
| 3895 | CACCTCCGCCGGCTGCCTCG | 2459 |
| 3896 | GCACCTCCGCCGGCTGCCTC | 2458 |
| 3897 | GGCACCTCCGCCGGCTGCCT | 2457 |
| 3898 | GGGCACCTCCGCCGGCTGCC | 2456 |
| 3899 | GGGGCACCTCCGCCGGCTGC | 2455 |
| 3900 | CGGGGCACCTCCGCCGGCTG | 2454 |
| 3901 | CCGGGGCACCTCCGCCGGCT | 2453 |
| 3902 | CCCGGGGCACCTCCGCCGGC | 2452 |
| 3903 | CCCCGGGGCACCTCCGCCGG | 2451 |
| 3904 | ACCCCGGGGCACCTCCGCCG | 2450 |
| 3905 | AACCCCGGGGCACCTCCGCC | 2449 |
| 3906 | CAACCCCGGGGCACCTCCGC | 2448 |
| 3907 | CCAACCCCGGGGCACCTCCG | 2447 |
| 3908 | TCCAACCCCGGGGCACCTCC | 2446 |
| 3909 | CTCCAACCCCGGGGCACCTC | 2445 |
| 3910 | TCTCCAACCCCGGGGCACCT | 2444 |
| 3911 | TTCTCCAACCCCGGGGCACC | 2443 |
| 3912 | TTTCTCCAACCCCGGGGCAC | 2442 |
| 3913 | CTTTCTCCAACCCCGGGGCA | 2441 |
| 3914 | TCTTTCTCCAACCCCGGGGC | 2440 |
| 3915 | GTCTTTCTCCAACCCCGGGG | 2439 |
| 3916 | AGTCTTTCTCCAACCCCGGG | 2438 |
| 3917 | GAGTCTTTCTCCAACCCCGG | 2437 |
| 3918 | CGAGTCTTTCTCCAACCCCG | 2436 |
| 3919 | GCGAGTCTTTCTCCAACCCC | 2435 |
| 3920 | GGCGAGTCTTTCTCCAACCC | 2434 |
| 3921 | CGGCGAGTCTTTCTCCAACC | 2433 |
| 3922 | GCGGCGAGTCTTTCTCCAAC | 2432 |
| 3923 | CGCGGCGAGTCTTTCTCCAA | 2431 |
| 3924 | CCGCGGCGAGTCTTTCTCCA | 2430 |
| 3925 | GCCGCGGCGAGTCTTTCTCC | 2429 |
| 3926 | GGCCGCGGCGAGTCTTTCTC | 2428 |
| 3927 | TCTCGGGTCCCGGCCTCGCCCGGCGGAGC | 2556 |
| 3928 | CTCGGGTCCCGGCCTCGCCC | 2557 |
| 3929 | TCGGGTCCCGGCCTCGCCCG | 2558 |
| 3930 | CGGGTCCCGGCCTCGCCCGG | 2559 |
| 3931 | GGGTCCCGGCCTCGCCCGGC | 2560 |
| 3932 | GGTCCCGGCCTCGCCCGGCG | 2561 |
| 3933 | GTCCCGGCCTCGCCCGGCGG | 2562 |
| 3934 | TCCCGGCCTCGCCCGGCGGA | 2563 |
| 3935 | CCCGGCCTCGCCCGGCGGAG | 2564 |
| 3936 | CCGGCCTCGCCCGGCGGAGC | 2565 |
| 3937 | CGGCCTCGCCCGGCGGAGCG | 2566 |
| 3938 | GGCCTCGCCCGGCGGAGCGG | 2567 |
| 3939 | GCCTCGCCCGGCGGAGCGGC | 2568 |
| 3940 | CCTCGCCCGGCGGAGCGGCC | 2569 |
| 3941 | CTCGCCCGGCGGAGCGGCCT | 2570 |
| 3942 | TCGCCCGGCGGAGCGGCCTC | 2571 |
| 3943 | CGCCCGGCGGAGCGGCCTCC | 2572 |
| 3944 | GCCCGGCGGAGCGGCCTCCC | 2573 |
| 3945 | CCCGGCGGAGCGGCCTCCCC | 2574 |
| 3946 | CCGGCGGAGCGGCCTCCCCA | 2575 |
| 3947 | CGGCGGAGCGGCCTCCCCAA | 2576 |
| 3948 | GGCGGAGCGGCCTCCCCAAG | 2577 |
| 3949 | GCGGAGCGGCCTCCCCAAGG | 2578 |
| 3950 | CGGAGCGGCCTCCCCAAGGT | 2579 |
| 3951 | GGAGCGGCCTCCCCAAGGTC | 2580 |
| 3952 | GAGCGGCCTCCCCAAGGTCA | 2581 |
| 3953 | AGCGGCCTCCCCAAGGTCAT | 2582 |
| 3954 | GCGGCCTCCCCAAGGTCATG | 2583 |
| 3955 | CGGCCTCCCCAAGGTCATGA | 2584 |
| 3956 | CTCTCGGGTCCCGGCCTCGC | 2555 |
| 3957 | TCTCTCGGGTCCCGGCCTCG | 2554 |
| 3958 | TTCTCTCGGGTCCCGGCCTC | 2553 |
| 3959 | CTTCTCTCGGGTCCCGGCCT | 2552 |
| 3960 | CCTTCTCTCGGGTCCCGGCC | 2551 |
| 3961 | CCCTTCTCTCGGGTCCCGGC | 2550 |
| 3962 | TCCCTTCTCTCGGGTCCCGG | 2549 |
| 3963 | GTCCCTTCTCTCGGGTCCCG | 2548 |
| 3964 | CGTCCCTTCTCTCGGGTCCC | 2547 |
| 3965 | GCGTCCCTTCTCTCGGGTCC | 2546 |
| 3966 | GGCGTCCCTTCTCTCGGGTC | 2545 |
| 3967 | CGGCGTCCCTTCTCTCGGGT | 2544 |
| 3968 | GCGGCGTCCCTTCTCTCGGG | 2543 |
| 3969 | GGCGGCGTCCCTTCTCTCGG | 2542 |
| 3970 | CGGCGGCGTCCCTTCTCTCG | 2541 |
| 3971 | CCGGCGGCGTCCCTTCTCTC | 2540 |
| 3972 | CCCGGCGGCGTCCCTTCTCT | 2539 |
| 3973 | GCCCGGCGGCGTCCCTTCTC | 2538 |
| 3974 | GGCCCGGCGGCGTCCCTTCT | 2537 |
| 3975 | AGGCCCGGCGGCGTCCCTTC | 2536 |
| 3976 | CAGGCCCGGCGGCGTCCCTT | 2535 |
| 3977 | CCAGGCCCGGCGGCGTCCCT | 2534 |
| 3978 | TCCAGGCCCGGCGGCGTCCC | 2533 |
| 3979 | CTCCAGGCCCGGCGGCGTCC | 2532 |
| 3980 | GCTCCAGGCCCGGCGGCGTC | 2531 |
| 3981 | AGCTCCAGGCCCGGCGGCGT | 2530 |
| 3982 | CAGCTCCAGGCCCGGCGGCG | 2529 |
| 3983 | CCAGCTCCAGGCCCGGCGGC | 2528 |
| 3984 | CCCAGCTCCAGGCCCGGCGG | 2527 |
| 3985 | CCCCAGCTCCAGGCCCGGCG | 2526 |
| 3986 | GCCCCAGCTCCAGGCCCGGC | 2525 |
| 3987 | AGCCCCAGCTCCAGGCCCGG | 2524 |
| 3988 | GAGCCCCAGCTCCAGGCCCG | 2523 |
| 3989 | CGAGCCCCAGCTCCAGGCCC | 2522 |
| 3990 | CCGAGCCCCAGCTCCAGGCC | 2521 |
| 3991 | CCCGAGCCCCAGCTCCAGGC | 2520 |
| 3992 | CCCCGAGCCCCAGCTCCAGG | 2519 |
| 3993 | ACCCCGAGCCCCAGCTCCAG | 2518 |
| 3994 | CACCCCGAGCCCCAGCTCCA | 2517 |
| 3995 | GCACCCCGAGCCCCAGCTCC | 2516 |
| 3996 | GGCACCCCGAGCCCCAGCTC | 2515 |
| 3997 | GGGCACCCCGAGCCCCAGCT | 2514 |
| 3998 | GGGGCACCCCGAGCCCCAGC | 2513 |
| 3999 | AGGGGCACCCCGAGCCCCAG | 2512 |
| 4000 | CAGGGGCACCCCGAGCCCCA | 2511 |
| 4001 | GCAGGGGCACCCCGAGCCCC | 2510 |
| 4002 | CGCAGGGGCACCCCGAGCCC | 2509 |
| 4003 | CCGCAGGGGCACCCCGAGCC | 2508 |
| 4004 | CCCGCAGGGGCACCCCGAGC | 2507 |
| 4005 | GCCCGCAGGGGCACCCCGAG | 2506 |
| 4006 | GGCCCGCAGGGGCACCCCGA | 2505 |
| 4007 | CGGCCCGCAGGGGCACCCCG | 2504 |
| 4008 | ACGGCCCGCAGGGGCACCCC | 2503 |
| 4009 | CACGGCCCGCAGGGGCACCC | 2502 |
| 4010 | CCACGGCCCGCAGGGGCACC | 2501 |
| 4011 | CCCACGGCCCGCAGGGGCAC | 2500 |
| 4012 | CCCCACGGCCCGCAGGGGCA | 2499 |
| 4013 | GCCCCACGGCCCGCAGGGGC | 2498 |
| 4014 | AGCCCCACGGCCCGCAGGGG | 2497 |
| 4015 | GAGCCCCACGGCCCGCAGGG | 2496 |
| 4016 | GGAGCCCCACGGCCCGCAGG | 2495 |
| 4017 | GGGAGCCCCACGGCCCGCAG | 2494 |
| 4018 | GGGGAGCCCCACGGCCCGCA | 2493 |
| 4019 | CGGGGAGCCCCACGGCCCGC | 2492 |
| 4020 | CCGGGGAGCCCCACGGCCCG | 2491 |
| 4021 | CCCGGGGAGCCCCACGGCCC | 2490 |
| 4022 | GCCCGGGGAGCCCCACGGCC | 2489 |
| 4023 | CGCCCGGGGAGCCCCACGGC | 2488 |
| 4024 | GCGCCCGGGGAGCCCCACGG | 2487 |
| 4025 | AGCGCCCGGGGAGCCCCACG | 2486 |
| 4026 | CAGCGCCCGGGGAGCCCCAC | 2485 |
| 4027 | CCAGCGCCCGGGGAGCCCCA | 2484 |
| 4028 | CCCAGCGCCCGGGGAGCCCC | 2483 |
| 4029 | GCCCAGCGCCCGGGGAGCCC | 2482 |
| 4030 | GGCCCAGCGCCCGGGGAGCC | 2481 |
| 4031 | TGGCCCAGCGCCCGGGGAGC | 2480 |
| 4032 | CTGGCCCAGCGCCCGGGGAG | 2479 |
| 4033 | GCTGGCCCAGCGCCCGGGGA | 2478 |
| 4034 | CGCTGGCCCAGCGCCCGGGG | 2477 |
| 4035 | TCGCTGGCCCAGCGCCCGGG | 2476 |
| 4036 | CTCGCTGGCCCAGCGCCCGG | 2475 |
| 4037 | CCTCGCTGGCCCAGCGCCCG | 2474 |
| 4038 | GCCTCGCTGGCCCAGCGCCC | 2473 |
| 4039 | TGCCTCGCTGGCCCAGCGCC | 2472 |
| 4040 | CTGCCTCGCTGGCCCAGCGC | 2471 |
| 4041 | GCTGCCTCGCTGGCCCAGCG | 2470 |
| 4042 | GGCTGCCTCGCTGGCCCAGC | 2469 |
| 4043 | CGGCTGCCTCGCTGGCCCAG | 2468 |
| 4044 | CCGGCTGCCTCGCTGGCCCA | 2467 |
| 4045 | GCCGGCTGCCTCGCTGGCCC | 2466 |
| 4046 | CGCCGGCTGCCTCGCTGGCC | 2465 |
| 4047 | CCGCCGGCTGCCTCGCTGGC | 2464 |
| 4048 | TCCGCCGGCTGCCTCGCTGG | 2463 |
| 4049 | CTCCGCCGGCTGCCTCGCTG | 2462 |
| 4050 | CCTCCGCCGGCTGCCTCGCT | 2461 |
| 4051 | ACCTCCGCCGGCTGCCTCGC | 2460 |
| 4052 | CACCTCCGCCGGCTGCCTCG | 2459 |
| 4053 | GCACCTCCGCCGGCTGCCTC | 2458 |
| 4054 | GGCACCTCCGCCGGCTGCCT | 2457 |
| 4055 | GGGCACCTCCGCCGGCTGCC | 2456 |
| 4056 | GGGGCACCTCCGCCGGCTGC | 2455 |
| 4057 | CGGGGCACCTCCGCCGGCTG | 2454 |
| 4058 | CCGGGGCACCTCCGCCGGCT | 2453 |
| 4059 | CCCGGGGCACCTCCGCCGGC | 2452 |
| 4060 | CCCCGGGGCACCTCCGCCGG | 2451 |
| 4061 | ACCCCGGGGCACCTCCGCCG | 2450 |
| 4062 | AACCCCGGGGCACCTCCGCC | 2449 |
| 4063 | CAACCCCGGGGCACCTCCGC | 2448 |
| 4064 | CCAACCCCGGGGCACCTCCG | 2447 |
| 4065 | TCCAACCCCGGGGCACCTCC | 2446 |
| 4066 | CTCCAACCCCGGGGCACCTC | 2445 |
| 4067 | TCTCCAACCCCGGGGCACCT | 2444 |
| 4068 | TTCTCCAACCCCGGGGCACC | 2443 |
| 4069 | TTTCTCCAACCCCGGGGCAC | 2442 |
| 4070 | CTTTCTCCAACCCCGGGGCA | 2441 |
| 4071 | TCTTTCTCCAACCCCGGGGC | 2440 |
| 4072 | GTCTTTCTCCAACCCCGGGG | 2439 |
| 4073 | AGTCTTTCTCCAACCCCGGG | 2438 |
| 4074 | GAGTCTTTCTCCAACCCCGG | 2437 |
| 4075 | CGAGTCTTTCTCCAACCCCG | 2436 |
| 4076 | GCGAGTCTTTCTCCAACCCC | 2435 |
| 4077 | GGCGAGTCTTTCTCCAACCC | 2434 |
| 4078 | CGGCGAGTCTTTCTCCAACC | 2433 |
| 4079 | GCGGCGAGTCTTTCTCCAAC | 2432 |
| 4080 | CGCGGCGAGTCTTTCTCCAA | 2431 |
| 4081 | CCGCGGCGAGTCTTTCTCCA | 2430 |
| 4082 | GCCGCGGCGAGTCTTTCTCC | 2429 |
| 4083 | GGCCGCGGCGAGTCTTTCTC | 2428 |
| 4084 | CATTCTGGCGGCGCCGCGGCTCGCG | 2730 |
| 4085 | ATTCTGGCGGCGCCGCGGCT | 2731 |
| 4086 | TTCTGGCGGCGCCGCGGCTC | 2732 |
| 4087 | TCTGGCGGCGCCGCGGCTCG | 2733 |
| 4088 | CTGGCGGCGCCGCGGCTCGC | 2734 |
| 4089 | TGGCGGCGCCGCGGCTCGCG | 2735 |
| 4090 | GGCGGCGCCGCGGCTCGCGC | 2736 |
| 4091 | GCGGCGCCGCGGCTCGCGCC | 2737 |
| 4092 | CGGCGCCGCGGCTCGCGCCC | 2738 |
| 4093 | GGCGCCGCGGCTCGCGCCCC | 2739 |
| 4094 | GCGCCGCGGCTCGCGCCCCG | 2740 |
| 4095 | CGCCGCGGCTCGCGCCCCGG | 2741 |
| 4096 | GCCGCGGCTCGCGCCCCGGC | 2742 |
| 4097 | CCGCGGCTCGCGCCCCGGCC | 2743 |
| 4098 | CGCGGCTCGCGCCCCGGCCC | 2744 |
| 4099 | GCGGCTCGCGCCCCGGCCCG | 2745 |
| 4100 | CGGCTCGCGCCCCGGCCCGA | 2746 |
| 4101 | GGCTCGCGCCCCGGCCCGAC | 2747 |
| 4102 | GCTCGCGCCCCGGCCCGACC | 2748 |
| 4103 | CCATTCTGGCGGCGCCGCGG | 2729 |
| 4104 | TCCATTCTGGCGGCGCCGCG | 2728 |
| 4105 | CTCCATTCTGGCGGCGCCGC | 2727 |
| 4106 | CCTCCATTCTGGCGGCGCCG | 2726 |
| 4107 | TCCTCCATTCTGGCGGCGCC | 2725 |
| 4108 | CTCCTCCATTCTGGCGGCGC | 2724 |
| 4109 | GCTCCTCCATTCTGGCGGCG | 2723 |
| 4110 | CGCTCCTCCATTCTGGCGGC | 2722 |
| 4111 | CCGCTCCTCCATTCTGGCGG | 2721 |
| 4112 | CCCGCTCCTCCATTCTGGCG | 2720 |
| 4113 | TCCCGCTCCTCCATTCTGGC | 2719 |
| 4114 | CTCCCGCTCCTCCATTCTGG | 2718 |
| 4115 | GCTCCCGCTCCTCCATTCTG | 2717 |
| 4116 | TGCTCCCGCTCCTCCATTCT | 2716 |
| 4117 | CTGCTCCCGCTCCTCCATTC | 2715 |
| 4118 | CCTGCTCCCGCTCCTCCATT | 2714 |
| 4119 | TCCTGCTCCCGCTCCTCCAT | 2713 |
| 4120 | TTCCTGCTCCCGCTCCTCCA | 2712 |
| 4121 | CTTCCTGCTCCCGCTCCTCC | 2711 |
| 4122 | ACTTCCTGCTCCCGCTCCTC | 2710 |
| 4123 | CACTTCCTGCTCCCGCTCCT | 2709 |
| 4124 | CCACTTCCTGCTCCCGCTCC | 2708 |
| 4125 | GCCACTTCCTGCTCCCGCTC | 2707 |
| 4126 | GGCCACTTCCTGCTCCCGCT | 2706 |
| 4127 | CGGCCACTTCCTGCTCCCGC | 2705 |
| 4128 | TCGGCCACTTCCTGCTCCCG | 2704 |
| 4129 | CTCGGCCACTTCCTGCTCCC | 2703 |
| 4130 | GCTCGGCCACTTCCTGCTCC | 2702 |
| 4131 | CGCTCGGCCACTTCCTGCTC | 2701 |
| 4132 | CCGCTCGGCCACTTCCTGCT | 2700 |
| 4133 | CCCGCTCGGCCACTTCCTGC | 2699 |
| 4134 | GCCCGCTCGGCCACTTCCTG | 2698 |
| 4135 | GGCCCGCTCGGCCACTTCCT | 2697 |
| 4136 | AGGCCCGCTCGGCCACTTCC | 2696 |
| 4137 | CAGGCCCGCTCGGCCACTTC | 2695 |
| 4138 | CCAGGCCCGCTCGGCCACTT | 2694 |
| 4139 | CCCAGGCCCGCTCGGCCACT | 2693 |
| 4140 | GCCCAGGCCCGCTCGGCCAC | 2692 |
| 4141 | CGCCCAGGCCCGCTCGGCCA | 2691 |
| 4142 | CCGCCCAGGCCCGCTCGGCC | 2690 |
| 4143 | CCCGCCCAGGCCCGCTCGGC | 2689 |
| 4144 | CCCCGCCCAGGCCCGCTCGG | 2688 |
| 4145 | TCCCCGCCCAGGCCCGCTCG | 2687 |
| 4146 | CTCCCCGCCCAGGCCCGCTC | 2686 |
| 4147 | CCTCCCCGCCCAGGCCCGCT | 2685 |
| 4148 | CCCTCCCCGCCCAGGCCCGC | 2684 |
| 4149 | GCCCTCCCCGCCCAGGCCCG | 2683 |
| 4150 | CGCCCTCCCCGCCCAGGCCC | 2682 |
| 4151 | GCGCCCTCCCCGCCCAGGCC | 2681 |
| 4152 | CGCGCCCTCCCCGCCCAGGC | 2680 |
| 4153 | CCGCGCCCTCCCCGCCCAGG | 2679 |
| 4154 | CCCGCGCCCTCCCCGCCCAG | 2678 |
| 4155 | CCCCGCGCCCTCCCCGCCCA | 2677 |
| 4156 | GCCCCGCGCCCTCCCCGCCC | 2676 |
| 4157 | CGCCCCGCGCCCTCCCCGCC | 2675 |
| 4158 | GCGCCCCGCGCCCTCCCCGC | 2674 |
| 4159 | CGCGCCCCGCGCCCTCCCCG | 2673 |
| 4160 | GCGCGCCCCGCGCCCTCCCC | 2672 |
| 4161 | CGCGCGCCCCGCGCCCTCCC | 2671 |
| 4162 | CCGCGCGCCCCGCGCCCTCC | 2670 |
| 4163 | CCCGCGCGCCCCGCGCCCTC | 2669 |
| 4164 | GCCCGCGCGCCCCGCGCCCT | 2668 |
| 4165 | GGCCCGCGCGCCCCGCGCCC | 2667 |
| 4166 | GGGCCCGCGCGCCCCGCGCC | 2666 |
| 4167 | CGGGCCCGCGCGCCCCGCGC | 2665 |
| 4168 | CCGGGCCCGCGCGCCCCGCG | 2664 |
| 4169 | GCCGGGCCCGCGCGCCCCGC | 2663 |
| 4170 | GGCCGGGCCCGCGCGCCCCG | 2662 |
| 4171 | TGGCCGGGCCCGCGCGCCCC | 2661 |
| 4172 | TTGGCCGGGCCCGCGCGCCC | 2660 |
| 4173 | CTTGGCCGGGCCCGCGCGCC | 2659 |
| 4174 | CCTTGGCCGGGCCCGCGCGC | 2658 |
| 4175 | CCCTTGGCCGGGCCCGCGCG | 2657 |
| 4176 | TCCCTTGGCCGGGCCCGCGC | 2656 |
| 4177 | CTCCCTTGGCCGGGCCCGCG | 2655 |
| 4178 | CCTCCCTTGGCCGGGCCCGC | 2654 |
| 4179 | CCCTCCCTTGGCCGGGCCCG | 2653 |
| 4180 | GCCCTCCCTTGGCCGGGCCC | 2652 |
| 4181 | CGCCCTCCCTTGGCCGGGCC | 2651 |
| 4182 | CCGCCCTCCCTTGGCCGGGC | 2650 |
| 4183 | GCCGCCCTCCCTTGGCCGGG | 2649 |
| 4184 | GGCCGCCCTCCCTTGGCCGG | 2648 |
| 4185 | GGGCCGCCCTCCCTTGGCCG | 2647 |
| 4186 | GGGGCCGCCCTCCCTTGGCC | 2646 |
| 4187 | TGGGGCCGCCCTCCCTTGGC | 2645 |
| 4188 | GTGGGGCCGCCCTCCCTTGG | 2644 |
| 4189 | CGTGGGGCCGCCCTCCCTTG | 2643 |
| 4190 | GCGTGGGGCCGCCCTCCCTT | 2642 |
| 4191 | GGCGTGGGGCCGCCCTCCCT | 2641 |
| 4192 | CGGCGTGGGGCCGCCCTCCC | 2640 |
| 4193 | CCGGCGTGGGGCCGCCCTCC | 2639 |
| 4194 | CCCGGCGTGGGGCCGCCCTC | 2638 |
| 4195 | GCCCGGCGTGGGGCCGCCCT | 2637 |
| 4196 | CGCCCGGCGTGGGGCCGCCC | 2636 |
| 4197 | GCGCCCGGCGTGGGGCCGCC | 2635 |
| 4198 | GGCGCCCGGCGTGGGGCCGC | 2634 |
| 4199 | CGGCGCCCGGCGTGGGGCCG | 2633 |
| 4200 | CCGGCGCCCGGCGTGGGGCC | 2632 |
| 4201 | CCCGGCGCCCGGCGTGGGGC | 2631 |
| 4202 | CCCCGGCGCCCGGCGTGGGG | 2630 |
| 4203 | CCCCCGGCGCCCGGCGTGGG | 2629 |
| 4204 | ACCCCCGGCGCCCGGCGTGG | 2628 |
| 4205 | CACCCCCGGCGCCCGGCGTG | 2627 |
| 4206 | GCACCCCCGGCGCCCGGCGT | 2626 |
| 4207 | TGCACCCCCGGCGCCCGGCG | 2625 |
| 4208 | CTGCACCCCCGGCGCCCGGC | 2624 |
| 4209 | CCTGCACCCCCGGCGCCCGG | 2623 |
| 4210 | GCCTGCACCCCCGGCGCCCG | 2622 |
| 4211 | AGCCTGCACCCCCGGCGCCC | 2621 |
| 4212 | CAGCCTGCACCCCCGGCGCC | 2620 |
| 4213 | GCAGCCTGCACCCCCGGCGC | 2619 |
| 4214 | GGCAGCCTGCACCCCCGGCG | 2618 |
| 4215 | CGGCAGCCTGCACCCCCGGC | 2617 |
| 4216 | CCGGCAGCCTGCACCCCCGG | 2616 |
| 4217 | GCCGGCAGCCTGCACCCCCG | 2615 |
| 4218 | GGCCGGCAGCCTGCACCCCC | 2614 |
| 4219 | GGGCCGGCAGCCTGCACCCC | 2613 |
| 4220 | GGGGCCGGCAGCCTGCACCC | 2612 |
| 4221 | TGGGGCCGGCAGCCTGCACC | 2611 |
| 4222 | CTGGGGCCGGCAGCCTGCAC | 2610 |
| 4223 | GCTGGGGCCGGCAGCCTGCA | 2609 |
| 4224 | GGCTGGGGCCGGCAGCCTGC | 2608 |
| 4225 | AGGCTGGGGCCGGCAGCCTG | 2607 |
| 4226 | GAGGCTGGGGCCGGCAGCCT | 2606 |
| 4227 | GGAGGCTGGGGCCGGCAGCC | 2605 |
| 4228 | CACCGGGCCGCCGCGTCCGGGCGCG | 2838 |
| 4229 | ACCGGGCCGCCGCGTCCGGG | 2839 |
| 4230 | CCGGGCCGCCGCGTCCGGGC | 2840 |
| 4231 | CGGGCCGCCGCGTCCGGGCG | 2841 |
| 4232 | GGGCCGCCGCGTCCGGGCGC | 2842 |
| 4233 | GGCCGCCGCGTCCGGGCGCG | 2843 |
| 4234 | GCCGCCGCGTCCGGGCGCGA | 2844 |
| 4235 | CCGCCGCGTCCGGGCGCGAG | 2845 |
| 4236 | CGCCGCGTCCGGGCGCGAGC | 2846 |
| 4237 | GCCGCGTCCGGGCGCGAGCG | 2847 |
| 4238 | CCGCGTCCGGGCGCGAGCGC | 2848 |
| 4239 | CGCGTCCGGGCGCGAGCGCG | 2849 |
| 4240 | GCGTCCGGGCGCGAGCGCGG | 2850 |
| 4241 | CGTCCGGGCGCGAGCGCGGG | 2851 |
| 4242 | GTCCGGGCGCGAGCGCGGGC | 2852 |
| 4243 | TCCGGGCGCGAGCGCGGGCC | 2853 |
| 4244 | CCGGGCGCGAGCGCGGGCCT | 2854 |
| 4245 | CGGGCGCGAGCGCGGGCCTA | 2855 |
| 4246 | GGGCGCGAGCGCGGGCCTAG | 2856 |
| 4247 | GGCGCGAGCGCGGGCCTAGC | 2857 |
| 4248 | GCGCGAGCGCGGGCCTAGCC | 2858 |
| 4249 | CGCGAGCGCGGGCCTAGCCG | 2859 |
| 4250 | GCGAGCGCGGGCCTAGCCGG | 2860 |
| 4251 | CGAGCGCGGGCCTAGCCGGG | 2861 |
| 4252 | GAGCGCGGGCCTAGCCGGGC | 2862 |
| 4253 | AGCGCGGGCCTAGCCGGGCC | 2863 |
| 4254 | GCGCGGGCCTAGCCGGGCCG | 2864 |
| 4255 | CGCGGGCCTAGCCGGGCCGC | 2865 |
| 4256 | GCGGGCCTAGCCGGGCCGCG | 2866 |
| 4257 | CGGGCCTAGCCGGGCCGCGG | 2867 |
| 4258 | GGGCCTAGCCGGGCCGCGGC | 2868 |
| 4259 | GGCCTAGCCGGGCCGCGGCC | 2869 |
| 4260 | GCCTAGCCGGGCCGCGGCCT | 2870 |
| 4261 | CCTAGCCGGGCCGCGGCCTC | 2871 |
| 4262 | CTAGCCGGGCCGCGGCCTCC | 2872 |
| 4263 | TAGCCGGGCCGCGGCCTCCG | 2873 |
| 4264 | AGCCGGGCCGCGGCCTCCGG | 2874 |
| 4265 | GCCGGGCCGCGGCCTCCGGC | 2875 |
| 4266 | CCGGGCCGCGGCCTCCGGCG | 2876 |
| 4267 | CGGGCCGCGGCCTCCGGCGC | 2877 |
| 4268 | GGGCCGCGGCCTCCGGCGCC | 2878 |
| 4269 | GGCCGCGGCCTCCGGCGCCC | 2879 |
| 4270 | GCCGCGGCCTCCGGCGCCCG | 2880 |
| 4271 | CCGCGGCCTCCGGCGCCCGC | 2881 |
| 4272 | CGCGGCCTCCGGCGCCCGCC | 2882 |
| 4273 | GCGGCCTCCGGCGCCCGCCG | 2883 |
| 4274 | CGGCCTCCGGCGCCCGCCGC | 2884 |
| 4275 | GGCCTCCGGCGCCCGCCGCT | 2885 |
| 4276 | GCCTCCGGCGCCCGCCGCTC | 2886 |
| 4277 | CCTCCGGCGCCCGCCGCTCC | 2887 |
| 4278 | CTCCGGCGCCCGCCGCTCCG | 2888 |
| 4279 | TCCGGCGCCCGCCGCTCCGC | 2889 |
| 4280 | CCGGCGCCCGCCGCTCCGCA | 2890 |
| 4281 | CGGCGCCCGCCGCTCCGCAT | 2891 |
| 4282 | GGCGCCCGCCGCTCCGCATC | 2892 |
| 4283 | GCGCCCGCCGCTCCGCATCC | 2893 |
| 4284 | CGCCCGCCGCTCCGCATCCC | 2894 |
| 4285 | GCCCGCCGCTCCGCATCCCC | 2895 |
| 4286 | CCCGCCGCTCCGCATCCCCG | 2896 |
| 4287 | CCGCCGCTCCGCATCCCCGC | 2897 |
| 4288 | CGCCGCTCCGCATCCCCGCG | 2898 |
| 4289 | GCCGCTCCGCATCCCCGCGG | 2899 |
| 4290 | CCGCTCCGCATCCCCGCGGG | 2900 |
| 4291 | CGCTCCGCATCCCCGCGGGC | 2901 |
| 4292 | GCTCCGCATCCCCGCGGGCC | 2902 |
| 4293 | CTCCGCATCCCCGCGGGCCG | 2903 |
| 4294 | TCCGCATCCCCGCGGGCCGG | 2904 |
| 4295 | CCGCATCCCCGCGGGCCGGC | 2905 |
| 4296 | CGCATCCCCGCGGGCCGGCG | 2906 |
| 4297 | GCATCCCCGCGGGCCGGCGC | 2907 |
| 4298 | CATCCCCGCGGGCCGGCGCT | 2908 |
| 4299 | ATCCCCGCGGGCCGGCGCTG | 2909 |
| 4300 | TCCCCGCGGGCCGGCGCTGG | 2910 |
| 4301 | CCCCGCGGGCCGGCGCTGGG | 2911 |
| 4302 | CCCGCGGGCCGGCGCTGGGC | 2912 |
| 4303 | CCGCGGGCCGGCGCTGGGCG | 2913 |
| 4304 | CGCGGGCCGGCGCTGGGCGG | 2914 |
| 4305 | GCGGGCCGGCGCTGGGCGGG | 2915 |
| 4306 | CGGGCCGGCGCTGGGCGGGG | 2916 |
| 4307 | GGGCCGGCGCTGGGCGGGGC | 2917 |
| 4308 | GGCCGGCGCTGGGCGGGGCC | 2918 |
| 4309 | GCCGGCGCTGGGCGGGGCCG | 2919 |
| 4310 | CCGGCGCTGGGCGGGGCCGG | 2920 |
| 4311 | CGGCGCTGGGCGGGGCCGGG | 2921 |
| 4312 | GGCGCTGGGCGGGGCCGGGC | 2922 |
| 4313 | GCGCTGGGCGGGGCCGGGCT | 2923 |
| 4314 | CGCTGGGCGGGGCCGGGCTG | 2924 |
| 4315 | GCTGGGCGGGGCCGGGCTGG | 2925 |
| 4316 | CTGGGCGGGGCCGGGCTGGA | 2926 |
| 4317 | TCACCGGGCCGCCGCGTCCG | 2837 |
| 4318 | CTCACCGGGCCGCCGCGTCC | 2836 |
| 4319 | ACTCACCGGGCCGCCGCGTC | 2835 |
| 4320 | GACTCACCGGGCCGCCGCGT | 2834 |
| 4321 | GGACTCACCGGGCCGCCGCG | 2833 |
| 4322 | GGGACTCACCGGGCCGCCGC | 2832 |
| 4323 | GGGGACTCACCGGGCCGCCG | 2831 |
| 4324 | CGGGGACTCACCGGGCCGCC | 2830 |
| 4325 | GCGGGGACTCACCGGGCCGC | 2829 |
| 4326 | GGCGGGGACTCACCGGGCCG | 2828 |
| 4327 | GGGCGGGGACTCACCGGGCC | 2827 |
| 4328 | CGGGCGGGGACTCACCGGGC | 2826 |
| 4329 | GCGGGCGGGGACTCACCGGG | 2825 |
| 4330 | GGCGGGCGGGGACTCACCGG | 2824 |
| 4331 | CGGCGGGCGGGGACTCACCG | 2823 |
| 4332 | ACGGCGGGCGGGGACTCACC | 2822 |
| 4333 | CACGGCGGGCGGGGACTCAC | 2821 |
| 4334 | CCACGGCGGGCGGGGACTCA | 2820 |
| 4335 | GCCACGGCGGGCGGGGACTC | 2819 |
| 4336 | GGCCACGGCGGGCGGGGACT | 2818 |
| 4337 | CGGCCACGGCGGGCGGGGAC | 2817 |
| 4338 | CACATCCGCCTCCGCCGCCCGG | 3160 |

```
Hot Zones (Relative upstream location to gene start site)
  1-350
  700-1100
1500-1650
1750-3650
```

### Examples

[0360] In FIG. 33, In MCF7 (human mammary breast cell line), AKT4 (169) produced statistically significant (P<0.05) inhibition at 10 μM compared to the untreated and negative control values. The AKT sequence AKT4 (169) fits the independent and dependent DNAi motif claims.

[0361] The secondary structure for AKT4 (169) is shown in FIG. 34.

Genetic Code (5′ Upstream Region)

(SEQ ID NO: 11965)

CGGCAGGACCGAGCGCGGCAGGCGGCTGGCCCAGCGCACGCAGCGCGGCC
CGAAGACGGGAGCAGGCGGCCGAGCACCGAGCGCTGGGCACCGGGCACCG
AGCGGCGGCGGCACGCGAGGCCCGGCCCCGAGCAGCGCCCCCGCCCGCCG
CGGCCTCCAGCCCGGCCCCGCCCAGCGCCGGCCCGCGGGGATGCGGAGCG
GCGGGCGCCGGAGGCCGCGGCCCGGCTAGGCCCGCGCTCGCGCCCGGACG
CGGCGGCCCGGTGAGTCCCCGCCCGCCGTGGCCGCCCGGGCCTGGATTTC
CTCCCCGCGGGCCGGGCCGCTTTGTTCGCGGCCGGTCGGGCCGGGGCGCG
AGCCGCGGCGCCGCCAGAATGGAGGAGCGGGAGCAGGAAGTGGCCGAGCG
GGCCTGGGCGGGGAGGGCGCGGGGCGCGCGGGCCCGGCCAAGGGAGGGCG
GCCCCACGCCGGGCGCCGGGGGTGCAGGCTGCCGGCCCCAGCCTCCCTCA
TGACCTTGGGGAGGCCGCTCCGCCGGGCGAGGCCGGGACCCGAGAGAAGG
GACGCCGCCGGGCCTGGAGCTGGGGCTCGGGGTGCCCCTGCGGGCCGTGG
GGCTCCCCGGGCGCTGGGCCAGCGAGGCAGCCGGCGGAGGTGCCCCGGGG
TTGGAGAAAGACTCGCCGCGGCCGGCCTTCAAGTTTGTGGGAGGGCCCCG
GAAGGAGACTTCGTTTCCCACGGACGAAAAGTTGTACGTGGTGGCGGGGT
ACCCAGGCTAGCCACAAAGGACTGTGACCCTCCTGGGCCCCGGAACTGCT
TCCTGTCTTGGGTGGGCCCTGGAGGTCCTGCCCGCCCATCCCAGAGGCCA
AGGCTTGGAGGGCAGCTGGGGCTTGCCCCTTAGATTGAGTATCCTGGGGC
GCTAGCGAGCTTGGTCCTGTCGGGACGGCCTCTGAGTGCTGCCTTGGTCA
GCGGGTGAGCTTGGGCCCCTGCTCTGCAGCCAGAGGCCGCCCCACATTCA
CTCCTGGGTCTCTCGGCCTTGCTCCAGGTGGCCACTTCTTGACTGCTTTG
AGTCCCTCATCCGAGCGAAGGGCGGACGGAGTCCGTTGGTGGGGGTCCGG
TTGCCTCTCCCGGGAGCTGTGTAGACTTCTCATACACCAGGGTTCTGGAG
GCAGATGGAGGAGCCCTTTCGAAAACAGAGTATTTTTTTTTAAGTTGTGA
CTTAATAATAGTAGCAAGAATATGTGCTTATGGTAAAGGCAGGCGGCAGG
TACGGAGGCTGTGGGAAGTCGGGGTCCCTCCGCCCCCACAGGCAGCCCTG
TGCTGGCCTGGTGTATACGTTTCTGTGCAGACGTACACCACCCTGTGTGA
GCACAGATGTATTTTTACACATGGCTCTGGACAGCTGTCTGACTCTGTCA
GCAGCAGGCCTTGGAGGGGCTCAGGCCCGTGTGGGGGTGGGGGGACATCC
AGAGGTCTTTGAGTCCAGCCCTCTGCCTCCAGGCCACGCCCACTCAGTGT
CGTCAGAGCCCCCTGTGCCTGAGGCGTGCGCGGCTCGGAGCCCTGCCCTC
GGAGTCCTGCGGTGCCTTCCTCGAGTCTGGCCTGCTTTCCATCCTGCTAA
GTACTTGGGGCATTTCCCTCTTTGGGTAAGGTGTGGTCTTCCCTGTCCTG
GCATTAGACACAAGGCAGTGGGCCTTCCTGCCATTCTAAGTGTAGCTTAA
GACAATCAGTGCAAAGCAACCCTTTGTGGGTGTCCAGCCCTTGCCTCGGG
AGGCCAGAAAGGTGGCCTGGGGGGAGAGCGTCTAAGCTGGCTGTGGAAAG
ACCCATGTTGGGATCCATTCCACAGAGGTCGTCAGGGGTCTCTGCCTGGC
CTGGAGGTCCCAGAGAGGACCCTCCTCCCCTCAGGAAGGCCCATCTGGAA
GGGTAGCAGAGGACTGCTCACAGGAAGAGCATGCGAAGTGCTCTTTCTGG
GGATGCCTGTAGTTGGTGATGTGGGAACTGGGTTTTGAGGGATGCCTAGG
AGTTCATCCATCAGAGGGGAAATGAGGAAGCCATGCAGGATCAATGGATA
AAGTGTGCTCAGGTGAGGGTTGGCTGGTGGGCCGCTGCAGGGCGGGGGCC
TGTCCAGTGCTCCCCCACTTACTTGCTGCCTCCCGACTGCTGTAATTATG
GGTCTGTAACCACCCTGGACTGGGTGCTCCTCACTGACGGACTTGTCTGA
ACCTCTCTTTGTCTCCAGCGCCCAGCACTGGGCCTGGCAAAACCTGAGAC
GCCCGGTACATGTTGGCCAAATGAATGAACCAGATTCAGACCGGCAGGGG
CGCTGTGGTTTAGGAGGGGCCTGGGGTTTCTCCCAGGAGGTTTTTGGGCT
TGCGCTGGAGGGCTCTGGACTCCCGTTTGCGCCAGTGGCCTGCATCCTGG
TCCTGTCTTCCTCATGTTTGAATTTCTTTGCTTTCCTAGTCTGGGGAGCA
GGGAGGAGCCCTGTGCCCTGTCCCAGGATCCATGGGTAGGAACACCATGG
ACAGGGAGAGCAAACGGGGCCATCTGTCACCAGGGGCTTAGGGAAGGCCG
AGCCAGCCTGGGTCAAAGAAGTCAAAGGGGCTGCCTGGAGGAGGCAGCCT
GTCAGCTGGTGCATCAGGTTAGGGAGGCTGGGAAGGCCTTTTGGGGATGG
GGGTGATTTGTCCAACGGCTGGGGGAGGTGGGAATGGGGAGGTGAGCAAG
GCAGCAGCTCTCAGGGCCTGGCTGTTGCGGGTGGTGGTGGCAGGGGCTGG
AGGCTCTAAGCCTAGAATAAGGAGAGGCCCAGGTCCAGGGAACTGTGTTC
AATTACATGGATTTGACACTTGGCAGCCCTGAGTGTTTTGGGGAGAGGGA
AGGCAGGCGGGCAGATGGGGGTCAGAGAGCTTAGAGGGATGGCAGCCCAC
CTGGGAAGGCAGGTGCGGGTGGAGCCCCCAGGCACGTGCAGTGGGTCTCT
GGCTCACCCAGGGCGAGGAGCTGCCCTTAGCCAGGCGTGGCCTCACATTC
AGCTTCCTTTGCTTCTCCCAGAGGCTGTGGCCAGGCCAGCTGGGCTCGGG
GAGCGCCAGCCTGAGAGGAGCGCGTGAGCGTCGCGGGAGCCTCGGGCACC
ATG

[0362] 17) CRAF. RAF proto-oncogene serine/threonine-protein kinase also known as proto-oncogene c-RAF or simply c-Raf or even Raf-1 is an enzyme is encoded by the RAF1 gene. The c-Raf protein is part of the ERK1/2 pathway as a MAP kinase kinase kinase (MAP3K) that functions downstream of the Ras subfamily of membrane associated GTPases.

[0363] Elevated C-Raf mRNA or protein levels have been identified in AML, head and neck cancer, prostate cancer and ovarian cancer (Schmidt et al., Leuk Res. 1994; 18:409-13, Riva et al., Eur J Cancer B Oral Oncol. 1995; 31B:384-91, Muhkerjhee et al., Prostate. 2005; 64:101-7). In ovarian cancer cell lines, antisense oligodeoxynucleotides (ODNs) inhibited cell proliferation in vitro (McPhillips et al., Br J Cancer. 2001; 85:1753-8) with similar results seen in lines derived from lung, cervical, prostate and colon carcinomas showed the same phenomenon.

[0364] Inhibiting cRAF may be useful against diabetic retinopathy, one of the leading causes of blindness A c-RAF inhibitor (iCo-007) is being developed for the treatment of various eye diseases that occur as complications of diabetes. In patients with diffuse diabetic macular edema presented positive results from the Phase 1 study showing that subjects tolerated iCo-007 well. In this study, a number of individuals exhibited a decrease of central macular edema compared to baseline using an analytical method called optical coherence tomography prompting the initiation of a Phase 2 study on iCo-007 in patients with diabetic macular edema.

[0365] Hereditary gain-of-function mutations of c-Raf are implicated in some rare, but severe syndromes. Mutation of c-Raf is one of the possible causes of Noonan syndrome: affected individuals have congenital heart defects, short and dysmorhic stature and several other deformities. Similar mutations in c-Raf can also cause a related condition, termed LEOPARD syndrome (Lentigo, Electrocardiographic abnormalities, Ocular hypertelorism, Pulmonary stenosis, Abnormal genitalia, Retarded growth, Deafness), with a complex association of defects.

[0366] Protein: c-Raf Gene: RAF1 (Homo sapiens, chromosome 3, 12625100-12705700 [NCBI Reference Sequence: NC_{—}000003.11]; start site location: 12660220; strand: negative)

Gene Identification

| | |
|---|---|
| GeneID | 5894 |
| HGNC | 9829 |
| HPRD | 01265 |
| MIM | 164760 |

Targeted Sequences

| | | Relative |
|---|---|---|
| | | upstream |
| | | location |
| Sequence | | to gene |
| ID No: | Sequence (5′-3′) | start site |
| 4339 | GCGCGAGCCCTACTGGCAGTCG | 25996 |
| 4462 | CGGGGCGTGGCCTAGCGATCTGGTGGCCG | 26073 |
| 4517 | TTTCGAAGCTGAAGAGGTTAGGCGACG | 26106 |
| 4519 | CGACGCTGACTTGCTTTCAGGAG | 26127 |
| 4533 | AATCGAGAAGAACCGGCTTTCGG | 26161 |
| 4556 | CTTTGACGCGTCCTCTCCGGGC | 26295 |
| 4585 | CGGCTCCGCCACTTGACAGCTATGTGG | 26334 |
| 4605 | AGGCGGAGATTGCGGTGAGCCGAAATCGCG | 27188 |
| 4609 | AGGCCGCCCCAACGTCCTGTCGTTCGGCGG | 25618 |
| 4677 | TCTCGCCCGCTCCTCCTCCCCGCGGCGGGTG | 25653 |
| 4745 | CGGGAGGCGGTCACATTCGGCGCG | 25690 |
| 4782 | CGGAGCCCCGAGCAGCCCCCGCATCG | 25730 |
| 4871 | CGCGCTCCGCGCCTCAGGGCACGCGCC | 25763 |
| 4960 | AGCCGTTCCCGCCTCACAATCG | 25840 |
| 4984 | CCGCCATCTAAGATGGCGGCC | 25876 |
| 5047 | CGGGCGGCCCAGACGAGCGAGCCCTCG | 25920 |
| 5110 | CGTCCTCCCGACCTGCGACGCCACCGGC | 25957 |

Target Shift Sequences

| | | Relative |
|---|---|---|
| | | upstream |
| | | location |
| Sequence | | to gene |
| ID No: | Sequence (5′-3′) | start site |
| 4339 | GCGCGAGCCCTACTGGCAGTCG | 25996 |
| 4340 | CGCGAGCCCTACTGGCAGTC | 25997 |
| 4341 | GCGAGCCCTACTGGCAGTCG | 25998 |
| 4342 | CGAGCCCTACTGGCAGTCGA | 25999 |
| 4343 | GAGCCCTACTGGCAGTCGAC | 26000 |
| 4344 | AGCCCTACTGGCAGTCGACT | 26001 |
| 4345 | GCCCTACTGGCAGTCGACTT | 26002 |
| 4346 | CCCTACTGGCAGTCGACTTC | 26003 |
| 4347 | CCTACTGGCAGTCGACTTCT | 26004 |
| 4348 | CTACTGGCAGTCGACTTCTA | 26005 |
| 4349 | TACTGGCAGTCGACTTCTAA | 26006 |
| 4350 | ACTGGCAGTCGACTTCTAAC | 26007 |
| 4351 | CTGGCAGTCGACTTCTAACT | 26008 |
| 4352 | TGGCAGTCGACTTCTAACTT | 26009 |
| 4353 | GGCAGTCGACTTCTAACTTG | 26010 |
| 4354 | GCAGTCGACTTCTAACTTGG | 26011 |
| 4355 | CAGTCGACTTCTAACTTGGC | 26012 |
| 4356 | AGTCGACTTCTAACTTGGCT | 26013 |
| 4357 | GTCGACTTCTAACTTGGCTC | 26014 |
| 4358 | TCGACTTCTAACTTGGCTCG | 26015 |
| 4359 | CGACTTCTAACTTGGCTCGG | 26016 |
| 4360 | GACTTCTAACTTGGCTCGGG | 26017 |
| 4361 | ACTTCTAACTTGGCTCGGGC | 26018 |
| 4362 | CTTCTAACTTGGCTCGGGCA | 26019 |
| 4363 | TTCTAACTTGGCTCGGGCAT | 26020 |
| 4364 | TCTAACTTGGCTCGGGCATC | 26021 |
| 4365 | CTAACTTGGCTCGGGCATCC | 26022 |
| 4366 | TAACTTGGCTCGGGCATCCA | 26023 |
| 4367 | AACTTGGCTCGGGCATCCAT | 26024 |
| 4368 | ACTTGGCTCGGGCATCCATC | 26025 |
| 4369 | CTTGGCTCGGGCATCCATCG | 26026 |
| 4370 | TTGGCTCGGGCATCCATCGC | 26027 |
| 4371 | TGGCTCGGGCATCCATCGCT | 26028 |
| 4372 | GGCTCGGGCATCCATCGCTC | 26029 |
| 4373 | GCTCGGGCATCCATCGCTCT | 26030 |
| 4374 | CTCGGGCATCCATCGCTCTG | 26031 |
| 4375 | TCGGGCATCCATCGCTCTGG | 26032 |
| 4376 | CGGGCATCCATCGCTCTGGC | 26033 |
| 4377 | GGGCATCCATCGCTCTGGCC | 26034 |
| 4378 | GGCATCCATCGCTCTGGCCT | 26035 |
| 4379 | GCATCCATCGCTCTGGCCTG | 26036 |
| 4380 | CATCCATCGCTCTGGCCTGA | 26037 |
| 4381 | ATCCATCGCTCTGGCCTGAA | 26038 |
| 4382 | TCCATCGCTCTGGCCTGAAC | 26039 |
| 4383 | CCATCGCTCTGGCCTGAACT | 26040 |
| 4384 | CATCGCTCTGGCCTGAACTC | 26041 |
| 4385 | ATCGCTCTGGCCTGAACTCA | 26042 |
| 4386 | TCGCTCTGGCCTGAACTCAG | 26043 |
| 4387 | CGCTCTGGCCTGAACTCAGG | 26044 |
| 4388 | TGCGCGAGCCCTACTGGCAG | 25995 |
| 4389 | CTGCGCGAGCCCTACTGGCA | 25994 |
| 4390 | TCTGCGCGAGCCCTACTGGC | 25993 |
| 4391 | TTCTGCGCGAGCCCTACTGG | 25992 |
| 4392 | ATTCTGCGCGAGCCCTACTG | 25991 |
| 4393 | GATTCTGCGCGAGCCCTACT | 25990 |
| 4394 | CGATTCTGCGCGAGCCCTAC | 25989 |
| 4395 | CCGATTCTGCGCGAGCCCTA | 25988 |
| 4396 | TCCGATTCTGCGCGAGCCCT | 25987 |
| 4397 | CTCCGATTCTGCGCGAGCCC | 25986 |
| 4398 | TCTCCGATTCTGCGCGAGCC | 25985 |
| 4399 | CTCTCCGATTCTGCGCGAGC | 25984 |
| 4400 | GCTCTCCGATTCTGCGCGAG | 25983 |
| 4401 | GGCTCTCCGATTCTGCGCGA | 25982 |
| 4402 | CGGCTCTCCGATTCTGCGCG | 25981 |
| 4403 | CCGGCTCTCCGATTCTGCGC | 25980 |
| 4404 | ACCGGCTCTCCGATTCTGCG | 25979 |
| 4405 | CACCGGCTCTCCGATTCTGC | 25978 |
| 4406 | CCACCGGCTCTCCGATTCTG | 25977 |
| 4407 | GCCACCGGCTCTCCGATTCT | 25976 |
| 4408 | CGCCACCGGCTCTCCGATTC | 25975 |
| 4409 | ACGCCACCGGCTCTCCGATT | 25974 |
| 4410 | GACGCCACCGGCTCTCCGAT | 25973 |
| 4411 | CGACGCCACCGGCTCTCCGA | 25972 |
| 4412 | GCGACGCCACCGGCTCTCCG | 25971 |
| 4413 | TGCGACGCCACCGGCTCTCC | 25970 |
| 4414 | CTGCGACGCCACCGGCTCTC | 25969 |
| 4415 | CCTGCGACGCCACCGGCTCT | 25968 |
| 4416 | ACCTGCGACGCCACCGGCTC | 25967 |
| 4417 | GACCTGCGACGCCACCGGCT | 25966 |
| 4418 | CGACCTGCGACGCCACCGGC | 25965 |
| 4419 | CCGACCTGCGACGCCACCGG | 25964 |
| 4420 | CCCGACCTGCGACGCCACCG | 25963 |
| 4421 | TCCCGACCTGCGACGCCACC | 25962 |
| 4422 | CTCCCGACCTGCGACGCCAC | 25961 |
| 4423 | CCTCCCGACCTGCGACGCCA | 25960 |
| 4424 | TCCTCCCGACCTGCGACGCC | 25959 |
| 4425 | GTCCTCCCGACCTGCGACGC | 25958 |
| 4426 | CGTCCTCCCGACCTGCGACG | 25957 |
| 4427 | TCGTCCTCCCGACCTGCGAC | 25956 |
| 4428 | CTCGTCCTCCCGACCTGCGA | 25955 |
| 4429 | GCTCGTCCTCCCGACCTGCG | 25954 |
| 4430 | TGCTCGTCCTCCCGACCTGC | 25953 |
| 4431 | GTGCTCGTCCTCCCGACCTG | 25952 |
| 4432 | GGTGCTCGTCCTCCCGACCT | 25951 |
| 4433 | CGGTGCTCGTCCTCCCGACC | 25950 |
| 4434 | TCGGTGCTCGTCCTCCCGAC | 25949 |
| 4435 | CTCGGTGCTCGTCCTCCCGA | 25948 |
| 4436 | ACTCGGTGCTCGTCCTCCCG | 25947 |
| 4437 | GACTCGGTGCTCGTCCTCCC | 25946 |
| 4438 | CGACTCGGTGCTCGTCCTCC | 25945 |
| 4439 | TCGACTCGGTGCTCGTCCTC | 25944 |
| 4440 | CTCGACTCGGTGCTCGTCCT | 25943 |
| 4441 | CCTCGACTCGGTGCTCGTCC | 25942 |
| 4442 | CCCTCGACTCGGTGCTCGTC | 25941 |
| 4443 | GCCCTCGACTCGGTGCTCGT | 25940 |
| 4444 | AGCCCTCGACTCGGTGCTCG | 25939 |
| 4445 | GAGCCCTCGACTCGGTGCTC | 25938 |
| 4446 | CGAGCCCTCGACTCGGTGCT | 25937 |
| 4447 | GCGAGCCCTCGACTCGGTGC | 25936 |
| 4448 | AGCGAGCCCTCGACTCGGTG | 25935 |
| 4449 | GAGCGAGCCCTCGACTCGGT | 25934 |
| 4450 | CGAGCGAGCCCTCGACTCGG | 25933 |
| 4451 | ACGAGCGAGCCCTCGACTCG | 25932 |
| 4452 | GACGAGCGAGCCCTCGACTC | 25931 |
| 4453 | AGACGAGCGAGCCCTCGACT | 25930 |
| 4454 | CAGACGAGCGAGCCCTCGAC | 25929 |
| 4455 | CCAGACGAGCGAGCCCTCGA | 25928 |
| 4456 | CCCAGACGAGCGAGCCCTCG | 25927 |
| 4457 | GCCCAGACGAGCGAGCCCTC | 25926 |
| 4458 | GGCCCAGACGAGCGAGCCCT | 25925 |
| 4459 | CGGCCCAGACGAGCGAGCCC | 25924 |
| 4460 | GCGGCCCAGACGAGCGAGCC | 25923 |
| 4461 | GGCGGCCCAGACGAGCGAGC | 25922 |
| 4462 | CGGGGCGTGGCCTAGCGATCTGGTGGCCG | 26073 |
| 4463 | GGGGCGTGGCCTAGCGATCT | 26074 |
| 4464 | GGGCGTGGCCTAGCGATCTG | 26075 |
| 4465 | GGCGTGGCCTAGCGATCTGG | 26076 |
| 4466 | GCGTGGCCTAGCGATCTGGT | 26077 |
| 4467 | CGTGGCCTAGCGATCTGGTG | 26078 |
| 4468 | GTGGCCTAGCGATCTGGTGG | 26079 |
| 4469 | TGGCCTAGCGATCTGGTGGC | 26080 |
| 4470 | GGCCTAGCGATCTGGTGGCC | 26081 |
| 4471 | GCCTAGCGATCTGGTGGCCG | 26082 |
| 4472 | CCTAGCGATCTGGTGGCCGC | 26083 |
| 4473 | CTAGCGATCTGGTGGCCGCC | 26084 |
| 4474 | TAGCGATCTGGTGGCCGCCA | 26085 |
| 4475 | AGCGATCTGGTGGCCGCCAT | 26086 |
| 4476 | GCGATCTGGTGGCCGCCATT | 26087 |
| 4477 | CGATCTGGTGGCCGCCATTT | 26088 |
| 4478 | GATCTGGTGGCCGCCATTTC | 26089 |
| 4479 | ATCTGGTGGCCGCCATTTCG | 26090 |
| 4480 | TCTGGTGGCCGCCATTTCGA | 26091 |
| 4481 | CTGGTGGCCGCCATTTCGAA | 26092 |
| 4482 | TGGTGGCCGCCATTTCGAAG | 26093 |
| 4483 | GGTGGCCGCCATTTCGAAGC | 26094 |
| 4484 | GTGGCCGCCATTTCGAAGCT | 26095 |
| 4485 | TGGCCGCCATTTCGAAGCTG | 26096 |
| 4486 | GGCCGCCATTTCGAAGCTGA | 26097 |
| 4487 | GCCGCCATTTCGAAGCTGAA | 26098 |
| 4488 | CCGCCATTTCGAAGCTGAAG | 26099 |
| 4489 | CGCCATTTCGAAGCTGAAGA | 26100 |
| 4490 | GCCATTTCGAAGCTGAAGAG | 26101 |
| 4491 | CCATTTCGAAGCTGAAGAGG | 26102 |
| 4492 | CATTTCGAAGCTGAAGAGGT | 26103 |
| 4493 | CCGGGGCGTGGCCTAGCGAT | 26072 |
| 4494 | CCCGGGGCGTGGCCTAGCGA | 26071 |
| 4495 | CCCCGGGGCGTGGCCTAGCG | 26070 |
| 4496 | CCCCCGGGGCGTGGCCTAGC | 26069 |
| 4497 | GCCCCCGGGGCGTGGCCTAG | 26068 |
| 4498 | CGCCCCCGGGGCGTGGCCTA | 26067 |
| 4499 | CCGCCCCCGGGGCGTGGCCT | 26066 |
| 4500 | CCCGCCCCCGGGGCGTGGCC | 26065 |
| 4501 | CCCCGCCCCCGGGGCGTGGC | 26064 |
| 4502 | GCCCCGCCCCCGGGGCGTGG | 26063 |
| 4503 | GGCCCCGCCCCCGGGGCGTG | 26062 |
| 4504 | AGGCCCCGCCCCCGGGGCGT | 26061 |
| 4505 | CAGGCCCCGCCCCCGGGGCG | 26060 |
| 4506 | TCAGGCCCCGCCCCCGGGGC | 26059 |
| 4507 | CTCAGGCCCCGCCCCCGGGG | 26058 |
| 4508 | ACTCAGGCCCCGCCCCCGGG | 26057 |
| 4509 | AACTCAGGCCCCGCCCCCGG | 26056 |
| 4510 | GAACTCAGGCCCCGCCCCCG | 26055 |
| 4511 | TGAACTCAGGCCCCGCCCCC | 26054 |
| 4512 | CTGAACTCAGGCCCCGCCCC | 26053 |
| 4513 | CCTGAACTCAGGCCCCGCCC | 26052 |
| 4514 | GCCTGAACTCAGGCCCCGCC | 26051 |
| 4515 | GGCCTGAACTCAGGCCCCGC | 26050 |
| 4516 | TGGCCTGAACTCAGGCCCCG | 26049 |
| 4517 | TTTCGAAGCTGAAGAGGTTAGGCGACG | 26105 |
| 4518 | TTCGAAGCTGAAGAGGTTAG | 26106 |
| 4519 | CGACGCTGACTTGCTTTCAGGAG | 26127 |
| 4520 | GACGCTGACTTGCTTTCAGG | 26128 |
| 4521 | ACGCTGACTTGCTTTCAGGA | 26129 |
| 4522 | CGCTGACTTGCTTTCAGGAG | 26130 |
| 4523 | GCGACGCTGACTTGCTTTCA | 26126 |
| 4524 | GGCGACGCTGACTTGCTTTC | 26125 |
| 4525 | AGGCGACGCTGACTTGCTTT | 26124 |
| 4526 | TAGGCGACGCTGACTTGCTT | 26123 |
| 4527 | TTAGGCGACGCTGACTTGCT | 26122 |
| 4528 | GTTAGGCGACGCTGACTTGC | 26121 |
| 4529 | GGTTAGGCGACGCTGACTTG | 26120 |
| 4530 | AGGTTAGGCGACGCTGACTT | 26119 |
| 4531 | GAGGTTAGGCGACGCTGACT | 26118 |
| 4532 | AGAGGTTAGGCGACGCTGAC | 26117 |
| 4533 | AATCGAGAAGAACCGGCTTTCGG | 26161 |
| 4534 | ATCGAGAAGAACCGGCTTTC | 26162 |
| 4535 | TCGAGAAGAACCGGCTTTCG | 26163 |
| 4536 | CGAGAAGAACCGGCTTTCGG | 26164 |
| 4537 | GAGAAGAACCGGCTTTCGGC | 26165 |
| 4538 | AGAAGAACCGGCTTTCGGCC | 26166 |
| 4539 | GAAGAACCGGCTTTCGGCCA | 26167 |
| 4540 | AAGAACCGGCTTTCGGCCAG | 26168 |
| 4541 | AGAACCGGCTTTCGGCCAGC | 26169 |
| 4542 | GAACCGGCTTTCGGCCAGCC | 26170 |
| 4543 | AACCGGCTTTCGGCCAGCCA | 26171 |
| 4544 | ACCGGCTTTCGGCCAGCCAG | 26172 |
| 4545 | CCGGCTTTCGGCCAGCCAGG | 26173 |
| 4546 | CGGCTTTCGGCCAGCCAGGA | 26174 |
| 4547 | GGCTTTCGGCCAGCCAGGAG | 26175 |
| 4548 | GCTTTCGGCCAGCCAGGAGT | 26176 |
| 4549 | CTTTCGGCCAGCCAGGAGTG | 26177 |
| 4550 | TTTCGGCCAGCCAGGAGTGG | 26178 |
| 4551 | TTCGGCCAGCCAGGAGTGGC | 26179 |
| 4552 | TCGGCCAGCCAGGAGTGGCC | 26180 |
| 4553 | CGGCCAGCCAGGAGTGGCCA | 26181 |
| 4554 | TAATCGAGAAGAACCGGCTT | 26160 |
| 4555 | GTAATCGAGAAGAACCGGCT | 26159 |
| 4556 | CTTTGACGCGTCCTCTCCGGGC | 26295 |
| 4557 | TTTGACGCGTCCTCTCCGGG | 26296 |
| 4558 | TTGACGCGTCCTCTCCGGGC | 26297 |
| 4559 | TGACGCGTCCTCTCCGGGCA | 26298 |
| 4560 | GACGCGTCCTCTCCGGGCAC | 26299 |
| 4561 | ACGCGTCCTCTCCGGGCACT | 26300 |
| 4562 | CGCGTCCTCTCCGGGCACTT | 26301 |
| 4563 | GCGTCCTCTCCGGGCACTTT | 26302 |
| 4564 | CGTCCTCTCCGGGCACTTTA | 26303 |
| 4565 | GTCCTCTCCGGGCACTTTAA | 26304 |
| 4566 | TCCTCTCCGGGCACTTTAAT | 26305 |
| 4567 | CCTCTCCGGGCACTTTAATA | 26306 |
| 4568 | CTCTCCGGGCACTTTAATAC | 26307 |
| 4569 | TCTCCGGGCACTTTAATACC | 26308 |
| 4570 | CTCCGGGCACTTTAATACCA | 26309 |
| 4571 | TCCGGGCACTTTAATACCAA | 26310 |
| 4572 | CCGGGCACTTTAATACCAAA | 26311 |
| 4573 | ACTTTGACGCGTCCTCTCCG | 26294 |
| 4574 | AACTTTGACGCGTCCTCTCC | 26293 |
| 4575 | CAACTTTGACGCGTCCTCTC | 26292 |
| 4576 | CCAACTTTGACGCGTCCTCT | 26291 |
| 4577 | TCCAACTTTGACGCGTCCTC | 26290 |
| 4578 | GTCCAACTTTGACGCGTCCT | 26289 |
| 4579 | TGTCCAACTTTGACGCGTCC | 26288 |
| 4580 | GTGTCCAACTTTGACGCGTC | 26287 |
| 4581 | AGTGTCCAACTTTGACGCGT | 26286 |
| 4582 | CAGTGTCCAACTTTGACGCG | 26285 |
| 4583 | ACAGTGTCCAACTTTGACGC | 26284 |
| 4584 | CACAGTGTCCAACTTTGACG | 26283 |
| 4585 | CGGCTCCGCCACTTGACAGCTATGTGG | 26334 |
| 4586 | GGCTCCGCCACTTGACAGCT | 26335 |
| 4587 | GCTCCGCCACTTGACAGCTA | 26336 |
| 4588 | CTCCGCCACTTGACAGCTAT | 26337 |
| 4589 | TCCGCCACTTGACAGCTATG | 26338 |
| 4590 | CCGCCACTTGACAGCTATGT | 26339 |
| 4591 | CGCCACTTGACAGCTATGTG | 26340 |
| 4592 | ACGGCTCCGCCACTTGACAG | 26333 |
| 4593 | CACGGCTCCGCCACTTGACA | 26332 |
| 4594 | TCACGGCTCCGCCACTTGAC | 26331 |
| 4595 | ATCACGGCTCCGCCACTTGA | 26330 |
| 4596 | AATCACGGCTCCGCCACTTG | 26329 |
| 4597 | AAATCACGGCTCCGCCACTT | 26328 |
| 4598 | CAAATCACGGCTCCGCCACT | 26327 |
| 4599 | CCAAATCACGGCTCCGCCAC | 26326 |
| 4600 | ACCAAATCACGGCTCCGCCA | 26325 |
| 4601 | TACCAAATCACGGCTCCGCC | 26324 |
| 4602 | ATACCAAATCACGGCTCCGC | 26323 |
| 4603 | AATACCAAATCACGGCTCCG | 26322 |
| 4604 | TAATACCAAATCACGGCTCC | 26321 |
| 4605 | AGGCGGAGATTGCGGTGAGCCGAAATCGCG | 27188 |
| 4606 | GGCGGAGATTGCGGTGAGCC | 27189 |
| 4607 | GCGGAGATTGCGGTGAGCCG | 27190 |
| 4608 | CGGAGATTGCGGTGAGCCGA | 27191 |
| 4609 | AGGCCGCCCCAACGTCCTGTCGTTCGGCGG | 25618 |
| 4610 | GGCCGCCCCAACGTCCTGTC | 25619 |
| 4611 | GCCGCCCCAACGTCCTGTCG | 25620 |
| 4612 | CCGCCCCAACGTCCTGTCGT | 25621 |
| 4613 | CGCCCCAACGTCCTGTCGTT | 25622 |
| 4614 | GCCCCAACGTCCTGTCGTTC | 25623 |
| 4615 | CCCCAACGTCCTGTCGTTCG | 25624 |
| 4616 | CCCAACGTCCTGTCGTTCGG | 25625 |
| 4617 | CCAACGTCCTGTCGTTCGGC | 25626 |
| 4618 | CAACGTCCTGTCGTTCGGCG | 25627 |
| 4619 | AACGTCCTGTCGTTCGGCGG | 25628 |
| 4620 | ACGTCCTGTCGTTCGGCGGC | 25629 |
| 4621 | CGTCCTGTCGTTCGGCGGCA | 25630 |
| 4622 | GTCCTGTCGTTCGGCGGCAG | 25631 |
| 4623 | TCCTGTCGTTCGGCGGCAGC | 25632 |
| 4624 | CCTGTCGTTCGGCGGCAGCT | 25633 |
| 4625 | CTGTCGTTCGGCGGCAGCTT | 25634 |
| 4626 | TGTCGTTCGGCGGCAGCTTC | 25635 |
| 4627 | GTCGTTCGGCGGCAGCTTCT | 25636 |
| 4628 | TCGTTCGGCGGCAGCTTCTC | 25637 |
| 4629 | CGTTCGGCGGCAGCTTCTCG | 25638 |
| 4630 | GTTCGGCGGCAGCTTCTCGC | 25639 |
| 4631 | TTCGGCGGCAGCTTCTCGCC | 25640 |
| 4632 | TCGGCGGCAGCTTCTCGCCC | 25641 |
| 4633 | CGGCGGCAGCTTCTCGCCCG | 25642 |
| 4634 | GGCGGCAGCTTCTCGCCCGC | 25643 |
| 4635 | GCGGCAGCTTCTCGCCCGCT | 25644 |
| 4636 | CGGCAGCTTCTCGCCCGCTC | 25645 |
| 4637 | GGCAGCTTCTCGCCCGCTCC | 25646 |
| 4638 | GCAGCTTCTCGCCCGCTCCT | 25647 |
| 4639 | CAGCTTCTCGCCCGCTCCTC | 25648 |
| 4640 | AGCTTCTCGCCCGCTCCTCC | 25649 |
| 4641 | GCTTCTCGCCCGCTCCTCCT | 25650 |
| 4642 | CTTCTCGCCCGCTCCTCCTC | 25651 |
| 4643 | TTCTCGCCCGCTCCTCCTCC | 25652 |
| 4644 | TCTCGCCCGCTCCTCCTCCC | 25653 |
| 4645 | CTCGCCCGCTCCTCCTCCCC | 25654 |
| 4646 | TCGCCCGCTCCTCCTCCCCG | 25655 |
| 4647 | CGCCCGCTCCTCCTCCCCGC | 25656 |
| 4648 | GCCCGCTCCTCCTCCCCGCG | 25657 |
| 4649 | CCCGCTCCTCCTCCCCGCGG | 25658 |
| 4650 | CCGCTCCTCCTCCCCGCGGC | 25659 |
| 4651 | CGCTCCTCCTCCCCGCGGCG | 25660 |
| 4652 | GCTCCTCCTCCCCGCGGCGG | 25661 |
| 4653 | CTCCTCCTCCCCGCGGCGGG | 25662 |
| 4654 | TCCTCCTCCCCGCGGCGGGT | 25663 |
| 4655 | CCTCCTCCCCGCGGCGGGTG | 25664 |
| 4656 | CTCCTCCCCGCGGCGGGTGA | 25665 |
| 4657 | TCCTCCCCGCGGCGGGTGAG | 25666 |
| 4658 | CCTCCCCGCGGCGGGTGAGG | 25667 |
| 4659 | CTCCCCGCGGCGGGTGAGGG | 25668 |
| 4660 | TCCCCGCGGCGGGTGAGGGA | 25669 |
| 4661 | CCCCGCGGCGGGTGAGGGAG | 25670 |
| 4662 | CCCGCGGCGGGTGAGGGAGC | 25671 |
| 4663 | CAGGCCGCCCCAACGTCCTG | 25617 |
| 4664 | CCAGGCCGCCCCAACGTCCT | 25616 |
| 4665 | GCCAGGCCGCCCCAACGTCC | 25615 |
| 4666 | AGCCAGGCCGCCCCAACGTC | 25614 |
| 4667 | GAGCCAGGCCGCCCCAACGT | 25613 |
| 4668 | GGAGCCAGGCCGCCCCAACG | 25612 |
| 4669 | GGGAGCCAGGCCGCCCCAAC | 25611 |
| 4670 | AGGGAGCCAGGCCGCCCCAA | 25610 |
| 4671 | GAGGGAGCCAGGCCGCCCCA | 25609 |
| 4672 | TGAGGGAGCCAGGCCGCCCC | 25608 |
| 4673 | CTGAGGGAGCCAGGCCGCCC | 25607 |
| 4674 | CCTGAGGGAGCCAGGCCGCC | 25606 |
| 4675 | ACCTGAGGGAGCCAGGCCGC | 25605 |
| 4676 | TACCTGAGGGAGCCAGGCCG | 25604 |
| 4677 | TCTCGCCCGCTCCTCCTCCCCGCGGCGGGTG | 25653 |
| 4678 | CTCGCCCGCTCCTCCTCCCC | 25654 |
| 4679 | TCGCCCGCTCCTCCTCCCCG | 25655 |
| 4680 | CGCCCGCTCCTCCTCCCCGC | 25656 |
| 4681 | GCCCGCTCCTCCTCCCCGCG | 25657 |
| 4682 | CCCGCTCCTCCTCCCCGCGG | 25658 |
| 4683 | CCGCTCCTCCTCCCCGCGGC | 25659 |
| 4684 | CGCTCCTCCTCCCCGCGGCG | 25660 |
| 4685 | GCTCCTCCTCCCCGCGGCGG | 25661 |
| 4686 | CTCCTCCTCCCCGCGGCGGG | 25662 |
| 4687 | TCCTCCTCCCCGCGGCGGGT | 25663 |
| 4688 | CCTCCTCCCCGCGGCGGGTG | 25664 |
| 4689 | CTCCTCCCCGCGGCGGGTGA | 25665 |
| 4690 | TCCTCCCCGCGGCGGGTGAG | 25666 |
| 4691 | CCTCCCCGCGGCGGGTGAGG | 25667 |
| 4692 | CTCCCCGCGGCGGGTGAGGG | 25668 |
| 4693 | TCCCCGCGGCGGGTGAGGGA | 25669 |
| 4694 | CCCCGCGGCGGGTGAGGGAG | 25670 |
| 4695 | CCCGCGGCGGGTGAGGGAGC | 25671 |
| 4696 | TTCTCGCCCGCTCCTCCTCC | 25652 |
| 4697 | CTTCTCGCCCGCTCCTCCTC | 25651 |
| 4698 | GCTTCTCGCCCGCTCCTCCT | 25650 |
| 4699 | AGCTTCTCGCCCGCTCCTCC | 25649 |
| 4700 | CAGCTTCTCGCCCGCTCCTC | 25648 |
| 4701 | GCAGCTTCTCGCCCGCTCCT | 25647 |
| 4702 | GGCAGCTTCTCGCCCGCTCC | 25646 |
| 4703 | CGGCAGCTTCTCGCCCGCTC | 25645 |
| 4704 | GCGGCAGCTTCTCGCCCGCT | 25644 |
| 4705 | GGCGGCAGCTTCTCGCCCGC | 25643 |
| 4706 | CGGCGGCAGCTTCTCGCCCG | 25642 |
| 4707 | TCGGCGGCAGCTTCTCGCCC | 25641 |
| 4708 | TTCGGCGGCAGCTTCTCGCC | 25640 |
| 4709 | GTTCGGCGGCAGCTTCTCGC | 25639 |
| 4710 | CGTTCGGCGGCAGCTTCTCG | 25638 |
| 4711 | TCGTTCGGCGGCAGCTTCTC | 25637 |
| 4712 | GTCGTTCGGCGGCAGCTTCT | 25636 |
| 4713 | TGTCGTTCGGCGGCAGCTTC | 25635 |
| 4714 | CTGTCGTTCGGCGGCAGCTT | 25634 |
| 4715 | CCTGTCGTTCGGCGGCAGCT | 25633 |
| 4716 | TCCTGTCGTTCGGCGGCAGC | 25632 |
| 4717 | GTCCTGTCGTTCGGCGGCAG | 25631 |
| 4718 | CGTCCTGTCGTTCGGCGGCA | 25630 |
| 4719 | ACGTCCTGTCGTTCGGCGGC | 25629 |
| 4720 | AACGTCCTGTCGTTCGGCGG | 25628 |
| 4721 | CAACGTCCTGTCGTTCGGCG | 25627 |
| 4722 | CCAACGTCCTGTCGTTCGGC | 25626 |
| 4723 | CCCAACGTCCTGTCGTTCGG | 25625 |
| 4724 | CCCCAACGTCCTGTCGTTCG | 25624 |
| 4725 | GCCCCAACGTCCTGTCGTTC | 25623 |
| 4726 | CGCCCCAACGTCCTGTCGTT | 25622 |
| 4727 | CCGCCCCAACGTCCTGTCGT | 25621 |
| 4728 | GCCGCCCCAACGTCCTGTCG | 25620 |
| 4729 | GGCCGCCCCAACGTCCTGTC | 25619 |
| 4730 | AGGCCGCCCCAACGTCCTGT | 25618 |
| 4731 | CAGGCCGCCCCAACGTCCTG | 25617 |
| 4732 | CCAGGCCGCCCCAACGTCCT | 25616 |
| 4733 | GCCAGGCCGCCCCAACGTCC | 25615 |
| 4734 | AGCCAGGCCGCCCCAACGTC | 25614 |
| 4735 | GAGCCAGGCCGCCCCAACGT | 25613 |
| 4736 | GGAGCCAGGCCGCCCCAACG | 25612 |
| 4737 | GGGAGCCAGGCCGCCCCAAC | 25611 |
| 4738 | AGGGAGCCAGGCCGCCCCAA | 25610 |
| 4739 | GAGGGAGCCAGGCCGCCCCA | 25609 |
| 4740 | TGAGGGAGCCAGGCCGCCCC | 25608 |
| 4741 | CTGAGGGAGCCAGGCCGCCC | 25607 |
| 4742 | CCTGAGGGAGCCAGGCCGCC | 25606 |
| 4743 | ACCTGAGGGAGCCAGGCCGC | 25605 |
| 4744 | TACCTGAGGGAGCCAGGCCG | 25604 |
| 4745 | CGGGAGGCGGTCACATTCGGCGCG | 25690 |
| 4746 | GGGAGGCGGTCACATTCGGC | 25691 |
| 4747 | GGAGGCGGTCACATTCGGCG | 25692 |
| 4748 | GAGGCGGTCACATTCGGCGC | 25693 |
| 4749 | AGGCGGTCACATTCGGCGCG | 25694 |
| 4750 | GGCGGTCACATTCGGCGCGT | 25695 |
| 4751 | GCGGTCACATTCGGCGCGTC | 25696 |
| 4752 | CGGTCACATTCGGCGCGTCC | 25697 |
| 4753 | GGTCACATTCGGCGCGTCCC | 25698 |
| 4754 | GTCACATTCGGCGCGTCCCC | 25699 |
| 4755 | TCACATTCGGCGCGTCCCCA | 25700 |
| 4756 | CACATTCGGCGCGTCCCCAG | 25701 |
| 4757 | ACATTCGGCGCGTCCCCAGC | 25702 |
| 4758 | CATTCGGCGCGTCCCCAGCC | 25703 |
| 4759 | ATTCGGCGCGTCCCCAGCCC | 25704 |
| 4760 | TTCGGCGCGTCCCCAGCCCA | 25705 |
| 4761 | TCGGCGCGTCCCCAGCCCAG | 25706 |
| 4762 | CGGCGCGTCCCCAGCCCAGG | 25707 |
| 4763 | GGCGCGTCCCCAGCCCAGGG | 25708 |
| 4764 | GCGCGTCCCCAGCCCAGGGG | 25709 |
| 4765 | CGCGTCCCCAGCCCAGGGGA | 25710 |
| 4766 | GCGTCCCCAGCCCAGGGGAC | 25711 |
| 4767 | CGTCCCCAGCCCAGGGGACG | 25712 |
| 4768 | GTCCCCAGCCCAGGGGACGG | 25713 |
| 4769 | TCCCCAGCCCAGGGGACGGA | 25714 |
| 4770 | CCCCAGCCCAGGGGACGGAG | 25715 |
| 4771 | CCCAGCCCAGGGGACGGAGC | 25716 |
| 4772 | CCAGCCCAGGGGACGGAGCC | 25717 |
| 4773 | CAGCCCAGGGGACGGAGCCC | 25718 |
| 4774 | AGCCCAGGGGACGGAGCCCC | 25719 |
| 4775 | GCCCAGGGGACGGAGCCCCG | 25720 |
| 4776 | CCCAGGGGACGGAGCCCCGA | 25721 |
| 4777 | CCAGGGGACGGAGCCCCGAG | 25722 |
| 4778 | CAGGGGACGGAGCCCCGAGC | 25723 |
| 4779 | GCGGGAGGCGGTCACATTCG | 25689 |
| 4780 | AGCGGGAGGCGGTCACATTC | 25688 |
| 4781 | GAGCGGGAGGCGGTCACATT | 25687 |
| 4782 | CGGAGCCCCGAGCAGCCCCCGCATCG | 25730 |
| 4783 | GGAGCCCCGAGCAGCCCCCG | 25731 |
| 4784 | GAGCCCCGAGCAGCCCCCGC | 25732 |
| 4785 | AGCCCCGAGCAGCCCCCGCA | 25733 |
| 4786 | GCCCCGAGCAGCCCCCGCAT | 25734 |
| 4787 | CCCCGAGCAGCCCCCGCATC | 25735 |
| 4788 | CCCGAGCAGCCCCCGCATCG | 25736 |
| 4789 | CCGAGCAGCCCCCGCATCGT | 25737 |
| 4790 | CGAGCAGCCCCCGCATCGTA | 25738 |
| 4791 | GAGCAGCCCCCGCATCGTAG | 25739 |
| 4792 | AGCAGCCCCCGCATCGTAGC | 25740 |
| 4793 | GCAGCCCCCGCATCGTAGCA | 25741 |
| 4794 | CAGCCCCCGCATCGTAGCAA | 25742 |
| 4795 | AGCCCCCGCATCGTAGCAAA | 25743 |
| 4796 | GCCCCCGCATCGTAGCAAAC | 25744 |
| 4797 | CCCCCGCATCGTAGCAAACG | 25745 |
| 4798 | CCCCGCATCGTAGCAAACGC | 25746 |
| 4799 | CCCGCATCGTAGCAAACGCG | 25747 |
| 4800 | CCGCATCGTAGCAAACGCGC | 25748 |
| 4801 | CGCATCGTAGCAAACGCGCT | 25749 |
| 4802 | GCATCGTAGCAAACGCGCTC | 25750 |
| 4803 | CATCGTAGCAAACGCGCTCC | 25751 |
| 4804 | ATCGTAGCAAACGCGCTCCG | 25752 |
| 4805 | TCGTAGCAAACGCGCTCCGC | 25753 |
| 4806 | CGTAGCAAACGCGCTCCGCG | 25754 |
| 4807 | GTAGCAAACGCGCTCCGCGC | 25755 |
| 4808 | TAGCAAACGCGCTCCGCGCC | 25756 |
| 4809 | AGCAAACGCGCTCCGCGCCT | 25757 |
| 4810 | GCAAACGCGCTCCGCGCCTC | 25758 |
| 4811 | CAAACGCGCTCCGCGCCTCA | 25759 |
| 4812 | AAACGCGCTCCGCGCCTCAG | 25760 |
| 4813 | AACGCGCTCCGCGCCTCAGG | 25761 |
| 4814 | ACGCGCTCCGCGCCTCAGGG | 25762 |
| 4815 | CGCGCTCCGCGCCTCAGGGC | 25763 |
| 4816 | GCGCTCCGCGCCTCAGGGCA | 25764 |
| 4817 | CGCTCCGCGCCTCAGGGCAC | 25765 |
| 4818 | GCTCCGCGCCTCAGGGCACG | 25766 |
| 4819 | CTCCGCGCCTCAGGGCACGC | 25767 |
| 4820 | TCCGCGCCTCAGGGCACGCG | 25768 |
| 4821 | CCGCGCCTCAGGGCACGCGC | 25769 |
| 4822 | CGCGCCTCAGGGCACGCGCC | 25770 |
| 4823 | GCGCCTCAGGGCACGCGCCC | 25771 |
| 4824 | CGCCTCAGGGCACGCGCCCC | 25772 |
| 4825 | GCCTCAGGGCACGCGCCCCA | 25773 |
| 4826 | CCTCAGGGCACGCGCCCCAA | 25774 |
| 4827 | CTCAGGGCACGCGCCCCAAA | 25775 |
| 4828 | TCAGGGCACGCGCCCCAAAG | 25776 |
| 4829 | CAGGGCACGCGCCCCAAAGC | 25777 |
| 4830 | AGGGCACGCGCCCCAAAGCC | 25778 |
| 4831 | GGGCACGCGCCCCAAAGCCC | 25779 |
| 4832 | GGCACGCGCCCCAAAGCCCG | 25780 |
| 4833 | GCACGCGCCCCAAAGCCCGG | 25781 |
| 4834 | CACGCGCCCCAAAGCCCGGC | 25782 |
| 4835 | ACGCGCCCCAAAGCCCGGCC | 25783 |
| 4836 | CGCGCCCCAAAGCCCGGCCA | 25784 |
| 4837 | GCGCCCCAAAGCCCGGCCAG | 25785 |
| 4838 | CGCCCCAAAGCCCGGCCAGC | 25786 |
| 4839 | GCCCCAAAGCCCGGCCAGCT | 25787 |
| 4840 | CCCCAAAGCCCGGCCAGCTG | 25788 |
| 4841 | CCCAAAGCCCGGCCAGCTGA | 25789 |
| 4842 | CCAAAGCCCGGCCAGCTGAC | 25790 |
| 4843 | CAAAGCCCGGCCAGCTGACC | 25791 |
| 4844 | AAAGCCCGGCCAGCTGACCC | 25792 |
| 4845 | AAGCCCGGCCAGCTGACCCT | 25793 |
| 4846 | AGCCCGGCCAGCTGACCCTT | 25794 |
| 4847 | GCCCGGCCAGCTGACCCTTT | 25795 |
| 4848 | CCCGGCCAGCTGACCCTTTT | 25796 |
| 4849 | CCGGCCAGCTGACCCTTTTC | 25797 |
| 4850 | CGGCCAGCTGACCCTTTTCG | 25798 |
| 4851 | GGCCAGCTGACCCTTTTCGG | 25799 |
| 4852 | GCCAGCTGACCCTTTTCGGG | 25800 |
| 4853 | CCAGCTGACCCTTTTCGGGG | 25801 |
| 4854 | CAGCTGACCCTTTTCGGGGC | 25802 |
| 4855 | AGCTGACCCTTTTCGGGGCC | 25803 |
| 4856 | GCTGACCCTTTTCGGGGCCC | 25804 |
| 4857 | CTGACCCTTTTCGGGGCCCA | 25805 |
| 4858 | TGACCCTTTTCGGGGCCCAA | 25806 |
| 4859 | GACCCTTTTCGGGGCCCAAA | 25807 |
| 4860 | ACCCTTTTCGGGGCCCAAAA | 25808 |
| 4861 | CCCTTTTCGGGGCCCAAAAA | 25809 |
| 4862 | CCTTTTCGGGGCCCAAAAAA | 25810 |
| 4863 | CTTTTCGGGGCCCAAAAAAG | 25811 |
| 4864 | TTTTCGGGGCCCAAAAAAGG | 25812 |
| 4865 | TTTCGGGGCCCAAAAAAGGC | 25813 |
| 4866 | TTCGGGGCCCAAAAAAGGCA | 25814 |
| 4867 | ACGGAGCCCCGAGCAGCCCC | 25729 |
| 4868 | GACGGAGCCCCGAGCAGCCC | 25728 |
| 4869 | GGACGGAGCCCCGAGCAGCC | 25727 |
| 4870 | GGGACGGAGCCCCGAGCAGC | 25726 |
| 4871 | CGCGCTCCGCGCCTCAGGGCACGCGCC | 25763 |
| 4872 | GCGCTCCGCGCCTCAGGGCA | 25764 |
| 4873 | CGCTCCGCGCCTCAGGGCAC | 25765 |
| 4874 | GCTCCGCGCCTCAGGGCACG | 25766 |
| 4875 | CTCCGCGCCTCAGGGCACGC | 25767 |
| 4876 | TCCGCGCCTCAGGGCACGCG | 25768 |
| 4877 | CCGCGCCTCAGGGCACGCGC | 25769 |
| 4878 | CGCGCCTCAGGGCACGCGCC | 25770 |
| 4879 | GCGCCTCAGGGCACGCGCCC | 25771 |
| 4880 | CGCCTCAGGGCACGCGCCCC | 25772 |
| 4881 | GCCTCAGGGCACGCGCCCCA | 25773 |
| 4882 | CCTCAGGGCACGCGCCCCAA | 25774 |
| 4883 | CTCAGGGCACGCGCCCCAAA | 25775 |
| 4884 | TCAGGGCACGCGCCCCAAAG | 25776 |
| 4885 | CAGGGCACGCGCCCCAAAGC | 25777 |
| 4886 | AGGGCACGCGCCCCAAAGCC | 25778 |
| 4887 | GGGCACGCGCCCCAAAGCCC | 25779 |
| 4888 | GGCACGCGCCCCAAAGCCCG | 25780 |
| 4889 | GCACGCGCCCCAAAGCCCGG | 25781 |
| 4890 | CACGCGCCCCAAAGCCCGGC | 25782 |
| 4891 | ACGCGCCCCAAAGCCCGGCC | 25783 |
| 4892 | CGCGCCCCAAAGCCCGGCCA | 25784 |
| 4893 | GCGCCCCAAAGCCCGGCCAG | 25785 |
| 4894 | CGCCCCAAAGCCCGGCCAGC | 25786 |
| 4895 | GCCCCAAAGCCCGGCCAGCT | 25787 |
| 4896 | CCCCAAAGCCCGGCCAGCTG | 25788 |
| 4897 | CCCAAAGCCCGGCCAGCTGA | 25789 |
| 4898 | CCAAAGCCCGGCCAGCTGAC | 25790 |
| 4899 | CAAAGCCCGGCCAGCTGACC | 25791 |
| 4900 | AAAGCCCGGCCAGCTGACCC | 25792 |
| 4901 | AAGCCCGGCCAGCTGACCCT | 25793 |
| 4902 | AGCCCGGCCAGCTGACCCTT | 25794 |
| 4903 | GCCCGGCCAGCTGACCCTTT | 25795 |
| 4904 | CCCGGCCAGCTGACCCTTTT | 25796 |
| 4905 | CCGGCCAGCTGACCCTTTTC | 25797 |
| 4906 | CGGCCAGCTGACCCTTTTCG | 25798 |
| 4907 | GGCCAGCTGACCCTTTTCGG | 25799 |
| 4908 | GCCAGCTGACCCTTTTCGGG | 25800 |
| 4909 | CCAGCTGACCCTTTTCGGGG | 25801 |
| 4910 | CAGCTGACCCTTTTCGGGGC | 25802 |
| 4911 | AGCTGACCCTTTTCGGGGCC | 25803 |
| 4912 | GCTGACCCTTTTCGGGGCCC | 25804 |
| 4913 | CTGACCCTTTTCGGGGCCCA | 25805 |
| 4914 | TGACCCTTTTCGGGGCCCAA | 25806 |
| 4915 | GACCCTTTTCGGGGCCCAAA | 25807 |
| 4916 | ACCCTTTTCGGGGCCCAAAA | 25808 |
| 4917 | CCCTTTTCGGGGCCCAAAAA | 25809 |
| 4918 | CCTTTTCGGGGCCCAAAAAA | 25810 |
| 4919 | CTTTTCGGGGCCCAAAAAAG | 25811 |
| 4920 | TTTTCGGGGCCCAAAAAAGG | 25812 |
| 4921 | TTTCGGGGCCCAAAAAAGGC | 25813 |
| 4922 | TTCGGGGCCCAAAAAAGGCA | 25814 |
| 4923 | ACGCGCTCCGCGCCTCAGGG | 25762 |
| 4924 | AACGCGCTCCGCGCCTCAGG | 25761 |
| 4925 | AAACGCGCTCCGCGCCTCAG | 25760 |
| 4926 | CAAACGCGCTCCGCGCCTCA | 25759 |
| 4927 | GCAAACGCGCTCCGCGCCTC | 25758 |
| 4928 | AGCAAACGCGCTCCGCGCCT | 25757 |
| 4929 | TAGCAAACGCGCTCCGCGCC | 25756 |
| 4930 | GTAGCAAACGCGCTCCGCGC | 25755 |
| 4931 | CGTAGCAAACGCGCTCCGCG | 25754 |
| 4932 | TCGTAGCAAACGCGCTCCGC | 25753 |
| 4933 | ATCGTAGCAAACGCGCTCCG | 25752 |
| 4934 | CATCGTAGCAAACGCGCTCC | 25751 |
| 4935 | GCATCGTAGCAAACGCGCTC | 25750 |
| 4936 | CGCATCGTAGCAAACGCGCT | 25749 |
| 4937 | CCGCATCGTAGCAAACGCGC | 25748 |
| 4938 | CCCGCATCGTAGCAAACGCG | 25747 |
| 4939 | CCCCGCATCGTAGCAAACGC | 25746 |
| 4940 | CCCCCGCATCGTAGCAAACG | 25745 |
| 4941 | GCCCCCGCATCGTAGCAAAC | 25744 |
| 4942 | AGCCCCCGCATCGTAGCAAA | 25743 |
| 4943 | CAGCCCCCGCATCGTAGCAA | 25742 |
| 4944 | GCAGCCCCCGCATCGTAGCA | 25741 |
| 4945 | AGCAGCCCCCGCATCGTAGC | 25740 |
| 4946 | GAGCAGCCCCCGCATCGTAG | 25739 |
| 4947 | CGAGCAGCCCCCGCATCGTA | 25738 |
| 4948 | CCGAGCAGCCCCCGCATCGT | 25737 |
| 4949 | CCCGAGCAGCCCCCGCATCG | 25736 |
| 4950 | CCCCGAGCAGCCCCCGCATC | 25735 |
| 4951 | GCCCCGAGCAGCCCCCGCAT | 25734 |
| 4952 | AGCCCCGAGCAGCCCCCGCA | 25733 |
| 4953 | GAGCCCCGAGCAGCCCCCGC | 25732 |
| 4954 | GGAGCCCCGAGCAGCCCCCG | 25731 |
| 4955 | CGGAGCCCCGAGCAGCCCCC | 25730 |
| 4956 | ACGGAGCCCCGAGCAGCCCC | 25729 |
| 4957 | GACGGAGCCCCGAGCAGCCC | 25728 |
| 4958 | GGACGGAGCCCCGAGCAGCC | 25727 |
| 4959 | GGGACGGAGCCCCGAGCAGC | 25726 |
| 4960 | AGCCGTTCCCGCCTCACAATCG | 25840 |
| 4961 | GCCGTTCCCGCCTCACAATC | 25841 |
| 4962 | CCGTTCCCGCCTCACAATCG | 25842 |
| 4963 | CGTTCCCGCCTCACAATCGT | 25843 |
| 4964 | GTTCCCGCCTCACAATCGTT | 25844 |
| 4965 | TTCCCGCCTCACAATCGTTT | 25845 |
| 4966 | TCCCGCCTCACAATCGTTTT | 25846 |
| 4967 | CCCGCCTCACAATCGTTTTC | 25847 |
| 4968 | CCGCCTCACAATCGTTTTCC | 25848 |
| 4969 | CGCCTCACAATCGTTTTCCT | 25849 |
| 4970 | GCCTCACAATCGTTTTCCTC | 25850 |
| 4971 | CCTCACAATCGTTTTCCTCT | 25851 |
| 4972 | AAGCCGTTCCCGCCTCACAA | 25839 |
| 4973 | AAAGCCGTTCCCGCCTCACA | 25838 |
| 4974 | GAAAGCCGTTCCCGCCTCAC | 25837 |
| 4975 | AGAAAGCCGTTCCCGCCTCA | 25836 |
| 4976 | CAGAAAGCCGTTCCCGCCTC | 25835 |
| 4977 | GCAGAAAGCCGTTCCCGCCT | 25834 |
| 4978 | AGCAGAAAGCCGTTCCCGCC | 25833 |
| 4979 | CAGCAGAAAGCCGTTCCCGC | 25832 |
| 4980 | GCAGCAGAAAGCCGTTCCCG | 25831 |
| 4981 | GGCAGCAGAAAGCCGTTCCC | 25830 |
| 4982 | AGGCAGCAGAAAGCCGTTCC | 25829 |
| 4983 | AAGGCAGCAGAAAGCCGTTC | 25828 |
| 4984 | CCGCCATCTAAGATGGCGGCC | 25876 |
| 4985 | CGCCATCTAAGATGGCGGCC | 25877 |
| 4986 | GCCATCTAAGATGGCGGCCC | 25878 |
| 4987 | CCATCTAAGATGGCGGCCCA | 25879 |
| 4988 | CATCTAAGATGGCGGCCCAA | 25880 |
| 4989 | ATCTAAGATGGCGGCCCAAG | 25881 |
| 4990 | TCTAAGATGGCGGCCCAAGC | 25882 |
| 4991 | CTAAGATGGCGGCCCAAGCG | 25883 |
| 4992 | TAAGATGGCGGCCCAAGCGC | 25884 |
| 4993 | AAGATGGCGGCCCAAGCGCC | 25885 |
| 4994 | AGATGGCGGCCCAAGCGCCC | 25886 |
| 4995 | GATGGCGGCCCAAGCGCCCG | 25887 |
| 4996 | ATGGCGGCCCAAGCGCCCGC | 25888 |
| 4997 | TGGCGGCCCAAGCGCCCGCG | 25889 |
| 4998 | GGCGGCCCAAGCGCCCGCGA | 25890 |
| 4999 | GCGGCCCAAGCGCCCGCGAT | 25891 |
| 5000 | CGGCCCAAGCGCCCGCGATT | 25892 |
| 5001 | GGCCCAAGCGCCCGCGATTA | 25893 |
| 5002 | GCCCAAGCGCCCGCGATTAA | 25894 |
| 5003 | CCCAAGCGCCCGCGATTAAG | 25895 |
| 5004 | CCAAGCGCCCGCGATTAAGA | 25896 |
| 5005 | CAAGCGCCCGCGATTAAGAC | 25897 |
| 5006 | AAGCGCCCGCGATTAAGACT | 25898 |
| 5007 | AGCGCCCGCGATTAAGACTC | 25899 |
| 5008 | GCGCCCGCGATTAAGACTCT | 25900 |
| 5009 | CGCCCGCGATTAAGACTCTC | 25901 |
| 5010 | GCCCGCGATTAAGACTCTCG | 25902 |
| 5011 | CCCGCGATTAAGACTCTCGG | 25903 |
| 5012 | CCGCGATTAAGACTCTCGGG | 25904 |
| 5013 | CGCGATTAAGACTCTCGGGC | 25905 |
| 5014 | GCGATTAAGACTCTCGGGCG | 25906 |
| 5015 | CGATTAAGACTCTCGGGCGG | 25907 |
| 5016 | GATTAAGACTCTCGGGCGGC | 25908 |
| 5017 | ATTAAGACTCTCGGGCGGCC | 25909 |
| 5018 | TTAAGACTCTCGGGCGGCCC | 25910 |
| 5019 | TAAGACTCTCGGGCGGCCCA | 25911 |
| 5020 | AAGACTCTCGGGCGGCCCAG | 25912 |
| 5021 | AGACTCTCGGGCGGCCCAGA | 25913 |
| 5022 | GACTCTCGGGCGGCCCAGAC | 25914 |
| 5023 | ACTCTCGGGCGGCCCAGACG | 25915 |
| 5024 | CTCTCGGGCGGCCCAGACGA | 25916 |
| 5025 | TCTCGGGCGGCCCAGACGAG | 25917 |
| 5026 | CTCGGGCGGCCCAGACGAGC | 25918 |
| 5027 | TCGGGCGGCCCAGACGAGCG | 25919 |
| 5028 | CGGGCGGCCCAGACGAGCGA | 25920 |
| 5029 | CCCGCCATCTAAGATGGCGG | 25875 |
| 5030 | TCCCGCCATCTAAGATGGCG | 25874 |
| 5031 | CTCCCGCCATCTAAGATGGC | 25873 |
| 5032 | ACTCCCGCCATCTAAGATGG | 25872 |
| 5033 | TACTCCCGCCATCTAAGATG | 25871 |
| 5034 | TTACTCCCGCCATCTAAGAT | 25870 |
| 5035 | CTTACTCCCGCCATCTAAGA | 25869 |
| 5036 | TCTTACTCCCGCCATCTAAG | 25868 |
| 5037 | CTCTTACTCCCGCCATCTAA | 25867 |
| 5038 | CCTCTTACTCCCGCCATCTA | 25866 |
| 5039 | TCCTCTTACTCCCGCCATCT | 25865 |
| 5040 | TTCCTCTTACTCCCGCCATC | 25864 |
| 5041 | TTTCCTCTTACTCCCGCCAT | 25863 |
| 5042 | TTTTCCTCTTACTCCCGCCA | 25862 |
| 5043 | GTTTTCCTCTTACTCCCGCC | 25861 |
| 5044 | CGTTTTCCTCTTACTCCCGC | 25860 |
| 5045 | TCGTTTTCCTCTTACTCCCG | 25859 |
| 5046 | ATCGTTTTCCTCTTACTCCC | 25858 |
| 5047 | CGGGCGGCCCAGACGAGCGAGCCCTCG | 25920 |
| 5048 | TCGGGCGGCCCAGACGAGCG | 25919 |
| 5049 | CTCGGGCGGCCCAGACGAGC | 25918 |
| 5050 | TCTCGGGCGGCCCAGACGAG | 25917 |
| 5051 | CTCTCGGGCGGCCCAGACGA | 25916 |
| 5052 | ACTCTCGGGCGGCCCAGACG | 25915 |
| 5053 | GACTCTCGGGCGGCCCAGAC | 25914 |
| 5054 | AGACTCTCGGGCGGCCCAGA | 25913 |
| 5055 | AAGACTCTCGGGCGGCCCAG | 25912 |
| 5056 | TAAGACTCTCGGGCGGCCCA | 25911 |
| 5057 | TTAAGACTCTCGGGCGGCCC | 25910 |
| 5058 | ATTAAGACTCTCGGGCGGCC | 25909 |
| 5059 | GATTAAGACTCTCGGGCGGC | 25908 |
| 5060 | CGATTAAGACTCTCGGGCGG | 25907 |
| 5061 | GCGATTAAGACTCTCGGGCG | 25906 |
| 5062 | CGCGATTAAGACTCTCGGGC | 25905 |
| 5063 | CCGCGATTAAGACTCTCGGG | 25904 |
| 5064 | CCCGCGATTAAGACTCTCGG | 25903 |
| 5065 | GCCCGCGATTAAGACTCTCG | 25902 |
| 5066 | CGCCCGCGATTAAGACTCTC | 25901 |
| 5067 | GCGCCCGCGATTAAGACTCT | 25900 |
| 5068 | AGCGCCCGCGATTAAGACTC | 25899 |
| 5069 | AAGCGCCCGCGATTAAGACT | 25898 |
| 5070 | CAAGCGCCCGCGATTAAGAC | 25897 |
| 5071 | CCAAGCGCCCGCGATTAAGA | 25896 |
| 5072 | CCCAAGCGCCCGCGATTAAG | 25895 |
| 5073 | GCCCAAGCGCCCGCGATTAA | 25894 |
| 5074 | GGCCCAAGCGCCCGCGATTA | 25893 |
| 5075 | CGGCCCAAGCGCCCGCGATT | 25892 |
| 5076 | GCGGCCCAAGCGCCCGCGAT | 25891 |
| 5077 | GGCGGCCCAAGCGCCCGCGA | 25890 |
| 5078 | TGGCGGCCCAAGCGCCCGCG | 25889 |
| 5079 | ATGGCGGCCCAAGCGCCCGC | 25888 |
| 5080 | GATGGCGGCCCAAGCGCCCG | 25887 |
| 5081 | AGATGGCGGCCCAAGCGCCC | 25886 |
| 5082 | AAGATGGCGGCCCAAGCGCC | 25885 |
| 5083 | TAAGATGGCGGCCCAAGCGC | 25884 |
| 5084 | CTAAGATGGCGGCCCAAGCG | 25883 |
| 5085 | TCTAAGATGGCGGCCCAAGC | 25882 |
| 5086 | ATCTAAGATGGCGGCCCAAG | 25881 |
| 5087 | CATCTAAGATGGCGGCCCAA | 25880 |
| 5088 | CCATCTAAGATGGCGGCCCA | 25879 |
| 5089 | GCCATCTAAGATGGCGGCCC | 25878 |
| 5090 | CGCCATCTAAGATGGCGGCC | 25877 |
| 5091 | CCGCCATCTAAGATGGCGGC | 25876 |
| 5092 | CCCGCCATCTAAGATGGCGG | 25875 |
| 5093 | TCCCGCCATCTAAGATGGCG | 25874 |
| 5094 | CTCCCGCCATCTAAGATGGC | 25873 |
| 5095 | ACTCCCGCCATCTAAGATGG | 25872 |
| 5096 | TACTCCCGCCATCTAAGATG | 25871 |
| 5097 | TTACTCCCGCCATCTAAGAT | 25870 |
| 5098 | CTTACTCCCGCCATCTAAGA | 25869 |
| 5099 | TCTTACTCCCGCCATCTAAG | 25868 |
| 5100 | CTCTTACTCCCGCCATCTAA | 25867 |
| 5101 | CCTCTTACTCCCGCCATCTA | 25866 |
| 5102 | TCCTCTTACTCCCGCCATCT | 25865 |
| 5103 | TTCCTCTTACTCCCGCCATC | 25864 |
| 5104 | TTTCCTCTTACTCCCGCCAT | 25863 |
| 5105 | TTTTCCTCTTACTCCCGCCA | 25862 |
| 5106 | GTTTTCCTCTTACTCCCGCC | 25861 |
| 5107 | CGTTTTCCTCTTACTCCCGC | 25860 |
| 5108 | TCGTTTTCCTCTTACTCCCG | 25859 |
| 5109 | ATCGTTTTCCTCTTACTCCC | 25858 |
| 5110 | CGTCCTCCCGACCTGCGACGCCACCGGC | 25957 |
| 5111 | GTCCTCCCGACCTGCGACGC | 25958 |
| 5112 | TCCTCCCGACCTGCGACGCC | 25959 |
| 5113 | CCTCCCGACCTGCGACGCCA | 25960 |
| 5114 | CTCCCGACCTGCGACGCCAC | 25961 |
| 5115 | TCCCGACCTGCGACGCCACC | 25962 |
| 5116 | CCCGACCTGCGACGCCACCG | 25963 |
| 5117 | CCGACCTGCGACGCCACCGG | 25964 |
| 5118 | CGACCTGCGACGCCACCGGC | 25965 |
| 5119 | GACCTGCGACGCCACCGGCT | 25966 |
| 5120 | ACCTGCGACGCCACCGGCTC | 25967 |
| 5121 | CCTGCGACGCCACCGGCTCT | 25968 |
| 5122 | CTGCGACGCCACCGGCTCTC | 25969 |
| 5123 | TGCGACGCCACCGGCTCTCC | 25970 |
| 5124 | GCGACGCCACCGGCTCTCCG | 25971 |
| 5125 | CGACGCCACCGGCTCTCCGA | 25972 |
| 5126 | GACGCCACCGGCTCTCCGAT | 25973 |
| 5127 | ACGCCACCGGCTCTCCGATT | 25974 |
| 5128 | CGCCACCGGCTCTCCGATTC | 25975 |
| 5129 | GCCACCGGCTCTCCGATTCT | 25976 |
| 5130 | CCACCGGCTCTCCGATTCTG | 25977 |
| 5131 | CACCGGCTCTCCGATTCTGC | 25978 |
| 5132 | ACCGGCTCTCCGATTCTGCG | 25979 |
| 5133 | CCGGCTCTCCGATTCTGCGC | 25980 |
| 5134 | CGGCTCTCCGATTCTGCGCG | 25981 |
| 5135 | GGCTCTCCGATTCTGCGCGA | 25982 |
| 5136 | GCTCTCCGATTCTGCGCGAG | 25983 |
| 5137 | CTCTCCGATTCTGCGCGAGC | 25984 |
| 5138 | TCTCCGATTCTGCGCGAGCC | 25985 |
| 5139 | CTCCGATTCTGCGCGAGCCC | 25986 |
| 5140 | TCCGATTCTGCGCGAGCCCT | 25987 |
| 5141 | CCGATTCTGCGCGAGCCCTA | 25988 |
| 5142 | CGATTCTGCGCGAGCCCTAC | 25989 |
| 5143 | GATTCTGCGCGAGCCCTACT | 25990 |
| 5144 | ATTCTGCGCGAGCCCTACTG | 25991 |
| 5145 | TTCTGCGCGAGCCCTACTGG | 25992 |
| 5146 | TCTGCGCGAGCCCTACTGGC | 25993 |
| 5147 | CTGCGCGAGCCCTACTGGCA | 25994 |
| 5148 | TGCGCGAGCCCTACTGGCAG | 25995 |
| 5149 | GCGCGAGCCCTACTGGCAGT | 25996 |
| 5150 | CGCGAGCCCTACTGGCAGTC | 25997 |
| 5151 | GCGAGCCCTACTGGCAGTCG | 25998 |
| 5152 | CGAGCCCTACTGGCAGTCGA | 25999 |
| 5153 | GAGCCCTACTGGCAGTCGAC | 26000 |
| 5154 | AGCCCTACTGGCAGTCGACT | 26001 |
| 5155 | GCCCTACTGGCAGTCGACTT | 26002 |
| 5156 | CCCTACTGGCAGTCGACTTC | 26003 |
| 5157 | CCTACTGGCAGTCGACTTCT | 26004 |
| 5158 | CTACTGGCAGTCGACTTCTA | 26005 |
| 5159 | TACTGGCAGTCGACTTCTAA | 26006 |
| 5160 | ACTGGCAGTCGACTTCTAAC | 26007 |
| 5161 | CTGGCAGTCGACTTCTAACT | 26008 |
| 5162 | TGGCAGTCGACTTCTAACTT | 26009 |
| 5163 | GGCAGTCGACTTCTAACTTG | 26010 |
| 5164 | GCAGTCGACTTCTAACTTGG | 26011 |
| 5165 | CAGTCGACTTCTAACTTGGC | 26012 |
| 5166 | AGTCGACTTCTAACTTGGCT | 26013 |
| 5167 | GTCGACTTCTAACTTGGCTC | 26014 |
| 5168 | TCGACTTCTAACTTGGCTCG | 26015 |
| 5169 | CGACTTCTAACTTGGCTCGG | 26016 |
| 5170 | GACTTCTAACTTGGCTCGGG | 26017 |
| 5171 | ACTTCTAACTTGGCTCGGGC | 26018 |
| 5172 | CTTCTAACTTGGCTCGGGCA | 26019 |
| 5173 | TTCTAACTTGGCTCGGGCAT | 26020 |
| 5174 | TCTAACTTGGCTCGGGCATC | 26021 |
| 5175 | CTAACTTGGCTCGGGCATCC | 26022 |
| 5176 | TAACTTGGCTCGGGCATCCA | 26023 |
| 5177 | AACTTGGCTCGGGCATCCAT | 26024 |
| 5178 | ACTTGGCTCGGGCATCCATC | 26025 |
| 5179 | CTTGGCTCGGGCATCCATCG | 26026 |
| 5180 | TTGGCTCGGGCATCCATCGC | 26027 |
| 5181 | TGGCTCGGGCATCCATCGCT | 26028 |
| 5182 | GGCTCGGGCATCCATCGCTC | 26029 |
| 5183 | GCTCGGGCATCCATCGCTCT | 26030 |
| 5184 | CTCGGGCATCCATCGCTCTG | 26031 |
| 5185 | TCGGGCATCCATCGCTCTGG | 26032 |
| 5186 | CGGGCATCCATCGCTCTGGC | 26033 |
| 5187 | GGGCATCCATCGCTCTGGCC | 26034 |
| 5188 | GGCATCCATCGCTCTGGCCT | 26035 |
| 5189 | GCATCCATCGCTCTGGCCTG | 26036 |
| 5190 | CATCCATCGCTCTGGCCTGA | 26037 |
| 5191 | ATCCATCGCTCTGGCCTGAA | 26038 |
| 5192 | TCCATCGCTCTGGCCTGAAC | 26039 |
| 5193 | CCATCGCTCTGGCCTGAACT | 26040 |
| 5194 | CATCGCTCTGGCCTGAACTC | 26041 |
| 5195 | ATCGCTCTGGCCTGAACTCA | 26042 |
| 5196 | TCGCTCTGGCCTGAACTCAG | 26043 |
| 5197 | CGCTCTGGCCTGAACTCAGG | 26044 |
| 5198 | TCGTCCTCCCGACCTGCGAC | 25956 |
| 5199 | CTCGTCCTCCCGACCTGCGA | 25955 |
| 5200 | GCTCGTCCTCCCGACCTGCG | 25954 |
| 5201 | TGCTCGTCCTCCCGACCTGC | 25953 |
| 5202 | GTGCTCGTCCTCCCGACCTG | 25952 |
| 5203 | GGTGCTCGTCCTCCCGACCT | 25951 |
| 5204 | CGGTGCTCGTCCTCCCGACC | 25950 |
| 5205 | TCGGTGCTCGTCCTCCCGAC | 25949 |
| 5206 | CTCGGTGCTCGTCCTCCCGA | 25948 |
| 5207 | ACTCGGTGCTCGTCCTCCCG | 25947 |
| 5208 | GACTCGGTGCTCGTCCTCCC | 25946 |
| 5209 | CGACTCGGTGCTCGTCCTCC | 25945 |
| 5210 | TCGACTCGGTGCTCGTCCTC | 25944 |
| 5211 | CTCGACTCGGTGCTCGTCCT | 25943 |
| 5212 | CCTCGACTCGGTGCTCGTCC | 25942 |
| 5213 | CCCTCGACTCGGTGCTCGTC | 25941 |
| 5214 | GCCCTCGACTCGGTGCTCGT | 25940 |
| 5215 | AGCCCTCGACTCGGTGCTCG | 25939 |
| 5216 | GAGCCCTCGACTCGGTGCTC | 25938 |
| 5217 | CGAGCCCTCGACTCGGTGCT | 25937 |
| 5218 | GCGAGCCCTCGACTCGGTGC | 25936 |
| 5219 | AGCGAGCCCTCGACTCGGTG | 25935 |
| 5220 | GAGCGAGCCCTCGACTCGGT | 25934 |
| 5221 | CGAGCGAGCCCTCGACTCGG | 25933 |
| 5222 | ACGAGCGAGCCCTCGACTCG | 25932 |
| 5223 | GACGAGCGAGCCCTCGACTC | 25931 |
| 5224 | AGACGAGCGAGCCCTCGACT | 25930 |
| 5225 | CAGACGAGCGAGCCCTCGAC | 25929 |
| 5226 | CCAGACGAGCGAGCCCTCGA | 25928 |
| 5227 | CCCAGACGAGCGAGCCCTCG | 25927 |
| 5228 | GCCCAGACGAGCGAGCCCTC | 25926 |
| 5229 | GGCCCAGACGAGCGAGCCCT | 25925 |
| 5230 | CGGCCCAGACGAGCGAGCCC | 25924 |
| 5231 | GCGGCCCAGACGAGCGAGCC | 25923 |
| 5232 | GGCGGCCCAGACGAGCGAGC | 25922 |

Hot Zones (Relative upstream location to gene start site)
25500-27500

### Examples

Genetic Code (5′ Upstream Region)

(SEQ ID NO: 11966)

AATACAGTCTTCCCCCACAGTTGAATATAGAATAAAATCTATTGCAAGCT
GGGTGCAGGGGCACAAGTGTGGCAGGAGTGCTTGAGCCTAGGAGTTCAAG
ACCAGCCTGGGCAACATAGTGAGACCTCATCTCAATTGAAAATATATATC
TATATAAAAAATAAAATTTATTACAGTTCATCTTGCTGGAAAACAAAATA
CTGTTTTTGTAATTAAAATTTTTTTTTTAAATTTAGAAATGGGGTCTTGC
TGTGTTGACCAGGCTGGTCTTGAACTCTTGGCCTCAAGCTGTCCTCCCAT
CTGGGCCTCCCAAAGTGCTGGGATTACAGGTGTGAACAACTGCGCCCGGC
TGACAAAGTATTTTTTAAAGATGTACCACTAAATGGAGATTTGATTCACA
TTTGATAGTTTTTGACAGGTCTTTTCTATTTAAAAACATTACTGTTTTTG
TAGCATTATTCTGGCTTTTCCCTTAATTTAGTAAATATTTGAGTGCCTTT
GTATTCCAGATACTGAGCAAGATTGGCAGGGTTCTGCCCTTATGGAGCAG
AAGGAAGGTAGGGGGACTGACTAAAACTTGAAAACTGTCTAACATAAGTA
CCATGCAGAAAATGAAACAGTATTAATTGGCAGAAGGAGAGCAGGCTATT
TTGGCTAGTGTGGTTAGGGAAAGCCTCTCTAAAGAGATGTCTCTTGGGTG
GAGACAAGATGTGAAAAAACCAGCTTGCCTGTTTTTGGGGTTTCAGCCTT
GCAGGTGAAGAGAAACACGAAGTTCAGAAGTCTTGAGGCACAAAGTCTGG
CATGTTACGAAAGAAGGCCTTTAGACGCCTTGTCAGGGAGTTTAGATTTT
ATTCTGAGTTTTAAAACGGGAGTGACACAATGAGTTGCATTTTAAGCCTG
TTCAGGCTGTTACATGGATTATTAGGAGCTGTATCATTTCAGGCTAGTGA
GATGCTCAGATGAGTCTGCCTTCTGTCTCTTCCGTCATCTATTTCTCTCT
TATCTGGTCTTAAGCTCCTCCATCTTTTCCTTTTTAGTTGGAAAAAAACT
CAAAGATCTAGAAAAAAGAGGAGCTGTATGTACTCCTAAAAAGGGACCTC
ATAGTAACCTGGGGATAGAGTTATGTAGGAGTGAGTCAGGGCTCAGGTTG
AGGCTTTAGAGGCAGGAGGCAGCGAGATCTTGTTCTGTCATCCCCTCTTA
CAGAAATAAAATATGCCGATAAAAGTTTATAGTGTAATAGTAAAATATAA
AAACAAAAAGTAAGTAATGTAGAAAATAAAAACCCTTCACAGTCCTGCTG
AAATGATTACTGTTAACACTTTAATTCTAGAGTTCCCCATCCATTTATTT
ATTTCTAGATTTCCCTCTTTGTAGATTAATATTAAAGGGTTCAGACTTGT
TCATTTTTTGTTGTCTTGGATATCTTTTCCCACCTCTGTATATATGGATC
TACTTTATTTATCACGTGGATATTAACATGGTTTATTTAATTCCCTATTG
TTAGGTATTTGGTCTTTACCACAGTTTTTCAAGGGTATGAATAGTGCTGC
AAGGAATATGCTTACACATGTTTTTATACACTTGTCTTAGGCTTCTGTAG
GACAAATTTCTGGAGTAGAATACTAGGTCATTCTTTAAGAACATTTCAAA
CTTTTAATAGATATTACCGTATTCTTTCCCAAAAAGAATGTACAAAGACT
GTATGAGAATAACTCCATGTTGTGATCTTAAGTTGTCTCTAAACCTCTTT
GGTTTTCTTAGCTGTCATCTAAGAATACTAAGTATCTAACCTCCCTCTTG
ATTTGGGCATGTGATGTGATTTAGCATATAGTGGATATTCAGTTAGAAAC
TTTTGGTTGAAAACAAGGTTTGGATTCTGTGGTCTTTAATTCTAGGCCAT
TTCAGCTCTGACTAAAATGATTTGAGTGTTAGTGTTATATATGGGAAGGT
AAGGGCTATGGAGTCAGTGCAGCCCAGTTCAGAATCCCAGTTTGCCACTT
ACAAGCTGTGTGTGTGAGAATTTTCTCAACTGTAAAATGGGGACATAATT
CCTACCTAGAGTAATACTGTAAGTATTAAGGTGGATAATGATTGGAATGT
ATGCTGTGTATCCTGCCTCATAATAGTAAGCTTTTAGTAAATGGTAGCTA
CTGTTAATAATAAAACAAGTTTCTGAAGGAGGAAGGCTTGAAAAGATGGG
ATTCCTTATCAACCTCAAAGTTTTCTAAAGGAGGAAACCCTACCCCCCTT
ACTTCTGCATGGTTTCTGACCATGAACTGAACTCTGAACTCTGAATGAAC
TGAACTCTGAACTCTGAATGAACTGAACTCTGAACTCTGAATGTTATGGT
AGAAAATTCATGGACTTTAAATTTAAACAGATAAAGAATCTGGTTATTTT
ACCCACTGCTGGGGTGTTCTTGGGCAAGTAGCATGACTTCTGTGTCCAAA
AAAGAAAGGGTTTGCAGTGACTGAACCTGTAATCCCAGTACTTTGGGAGG
CTAAGGAGAGTGGATTGCCTGAGCTCAGGAGTTCAAGACCAGCCTGGGCA
ACATAGTGAGAGCCTTTCTCAACAAAAAAAACTGTTCTTAAAAATTAGCT
GGGCATGGTGATGCACGTCTGTGGTCCCAGCTATGTGGGAAGCTGAGGTA
GGAGAATCATTTGAGCCTGGAAAATTGAAGCTGCAGTGAGCTGTGATCAT
GTCACTGCACCCCAGCCTGGGCAACAGAGCAAGACCCTGTCTCAGAAAAT
AAATTAATTAAAAAGAAAGTGTGGATGGAGGAAGGGATTAAAAATCTGGC
TGGGCACGGTGGCTCATGCCTGTAATCCCAGGCGTGATTTGGGAGGCCGA
GGCGGACAGATCACGAGGTCAAGAGATTGAGACCATCCTGGCCAACATGG
CCAACCCCATCTCTACTAAAAATACAAAAATCAGTCGGGCGTGGTGGTGC
ATGCCTGTAATCCCGGCTACTCGGGAGGCTGAGGCAGGAGAATCGCTTGA
ACCTGGGAGGTTCAGTGAGCCAAGATCGCGCCACTACACTCCAGCCTGGC
AATAGAGTGAGACTCTGTCTCAAAAGAAAAGAAAAGAAAAGAAAATCTTT
GGGGTTCTTACACAAATTAAATGAGATAATTTATTATTATTATTTTTTTT
GAGATGGAGTCTTGCTCTGTCCCCCAGGCTGGAGTGCAGTGGTGCGATCT
CAGCTCACCGCAAGCTCTGCCTCCCGGGTTCACGCCATTCCCCTGCCTCA
GCCTCCTGAGTAGCTGGGACTACAGGCGCCCGCCACCATGCCTGGCTAAT
TTTTTGTATTTTTAGTAGAGACAGGGTATCCCTGTGTTAGCTAGGATGGT
CTCGATCTCCTGACCTTGTGATCCGCCCATCTCGGCCTCCCAAAGTGCTG
GGATTACAGGTATGAGCCACCATGCCCGGCTTGAGATAATTTATAAAGTG
CCTAAAATACATCCTAGAAATATTAGTTTTTCTTCCTTGAAGTCATAAAT
TATGGCTTACACTTTTTTTCAGGTATTTCTCATAGTACTAATGTGTTGCT
CACACTCAAGGGTAGTAGTTGCTTAGGAAGAAGAGAAATGTAGTTGAAAA
AGTAATAGACTAGAAGTCTTGAGACCTGGGCTCATGTTCCAAGTTGGCTT
TTTTTTTTTTTTTTGGGAGATGGAGTCTCGCTCTTGTCCCCCAGCCTGGA
GTGCAATGACACGATATCGACTCACTGCAACCTCCACCTCCTGGGTTCAA
GTGATTTCTCCTGCCTCAGCCTCCCTAGTAGCTGGGATGACAGACACCCA
CCACCATGCCTGGCTAATTTTTGTATTTTAAGTAGTGACAGCATTTTACC
ATGTTAGCCAGGCTGGTCTTGAACTCCTGGCCTCAAGTGATGCGCTGGCC
TCGGCCTCCCAAAGTGCTGGGATTACAGGCATGAGCCACTGTGCCTGGTC
CCTTGCTAAATGTTTTGTTTTGTTTTGTTTTGTTTTTGAGGTGGAGTCTT
GCTCTGTCACCCAGGCTGGAGTGCGGTGGCATGATCTCCGCTCACTGCAA
GCTCCGCCTCCCAGGTTCCCGCCATTCTCCTGCCTCAGCCTCCCGAGTAG
CTGGGACTACAGGCGCCCGCCACCACGCCCGGCTAATTTTTTGTATTTTT
AGTAGAGATGGGGTTTCACCGTGTTAGCCAGGATGGTCTCCATCTCCTGA
CCTCGTGATGCACCCACCTCGGCCTCCCAAAGTGCTGGGATTACAGGCGT
GAGCCACCGTGCCCCGCAGTTGCTTGCTAAATCTTTTAACTGCTGGTCCC
ATTTTCCTCATCTATGAAATATTTAATGGAAGTGTACTATTAAAGAAACT
TTTCTTTGCTGATGAATGCAGGAGGTATCATTAAAAACCCACATAGTGCT
ATTTTCATAATTACTCTTTATGTATTGTGTTCTTGGGTTGAATACTTTTG
TTCTAGAGTTACAATTATTTGTGTTTCTTACCAGGTTTAAGAATTGTTTA
AGCTGCATCAATG

[0368] 18) Beta catenin. Proto-oncogene protein Wnt-1 is a protein that in humans is encoded by the WNT1 gene (Van Ooyen et. al, 1986; Nat. Genet. 28 (3): 261-5 and Aarheden et al., 1988; Cytogenet Cell Genet 47 (1-2): 86-87). The WNT gene family consists of structurally related genes that encode secreted signaling proteins that are implicated in oncogenesis and in several developmental processes, including regulation of cell fate and patterning during embryogenesis. Wnt-1 t is conserved in evolution with the protein encoded by this gene having 98% identity to the mouse Wnt1 protein at the amino acid level.

[0369] Beta-catenin (or β-catenin) is a protein that in humans is encoded by the CTNNB1 gene. β-catenin is a subunit of the cadherin protein complex and acts as an intracellular signal transducer in the Wnt signaling pathway (McDonald et al, 2009; Developmental Cell 17 (1): 9-26). Recent evidence suggests that β-catenin plays an important role in various aspects of liver biology including liver development (both embryonic and postnatal), liver regeneration following partial hepatectomy, HGF-induced hepatomegaly, liver zonation, and pathogenesis of liver cancer (Thompson and Monga, 2007; Hepatology 45 (5): 1298-305). The gene that codes for β-catenin can function as an oncogene. An increase in β-catenin production has been noted in those people with basal cell carcinoma and leads to the increase in proliferation of related tumors (Saldanha et al, 2004; Cancer Epidemiol. Biomarkers Prev. 17 (8): 2101-8. Mutations in this gene are a cause of colorectal cancer (CRC), pilomatrixoma (PTR), medulloblastoma (MDB), and ovarian cancer. Also, β-catenin binds to the product of the APC gene, which is mutated in adenomatous polyposis of the colon (reviewed in Wang et al, 2008; Cancer Epidemiol. Biomarkers Prev. 17 (8): 2101-8).

[0370] Protein: Beta-catenin Gene: CTNNB1 (Homo sapiens, chromosome 3, 41240942-41281939 [NCBI Reference Sequence: NC_{—}000003.11]; start site location: 41265560; strand: positive)

Gene Identification

| | |
|---|---|
| GeneID | 1499 |
| HGNC | 2514 |
| HPRD | — |
| MIM | 116806 |

Targeted Sequences

| | | | Relative |
|---|---|---|---|
| | | | upstream |
| | | | location |
| | | | to gene |
| Sequence | Designed | | start |
| ID No: | ID | Sequence (5′-3′) | site |
| 5233 | BC1 | CGCATATTACTGGGTAAACTCTGTG | 1411 |
| 5234 | | CACGCTGGATTTTCAAAACAGTTG | 5 |

Target Shift Sequences

| | | Relative |
|---|---|---|
| | | upstream |
| Sequence | | location to |
| ID No: | Sequence (5′-3′) | gene start site |
| 5233 | CGCATATTACTGGGTAAACTCTGTG | 1411 |
| 5234 | CACGCTGGATTTTCAAAACAGTTG | 5 |
| 11987 | CCACGCTGGATTTTCAAAAC | 4 |

Hot Zones (Relative upstream location to gene start site)
1-250
1400-1500

### Examples

[0371] In FIG. 35, In MCF7 (human mammary breast cell line), BC1 (191) produced statistically significant (P<0.05) inhibition at 10 μM compared to the untreated control values. The β-catenin sequence BC1 fits the independent and dependent DNAi motif claims.

[0372] The secondary structure for BC1 (191) is shown in FIG. 36.

Genetic Code (5′ Upstream Region)

(SEQ ID NO: 11967)

ACCCTGTAGGATGGGCGGGTGATGGTATGTATGTTAGATGTGTGGACATA
TCTATTAAAAGTTGTGTCAGATAACAGCTGGTGCTGACAAGCCCTTGGTA
AGATGGCAGCATGTTCAATATGTTCTGTGAAAATTATCTCAGTTTATGAT
CTGTCAGTATTGTGGAGCTATGCATGAAAGGACTTAAAATTCTTACCCTT
AAACTCAGTAACAGTGTTTCTAGAACTTCTGGTGATATGGGAAATTAAGA
GAATTATTTATATGCAAAGGTGTTTATTGCAGCATTGTTGGAATAATAGA
CAAAATGGGGAAGAACAAGCTCAGAATGGAGGAGGTAGCTTATAGTATAG
ACATACGATACAATCCAGATGATAATATTTTATAATAGTCTTCACAAGGA
ATTTTATATTTTTATTTTTAAAAATACATAGCAGTGAGTTTAATATACCA
AACATACCAAAATGTCATCATTTACTGTGTGGTGGACTCATATGATGGAG
ATGATAAATAAAAATATTAATTTATTTGAGGCATATATTTATGGCTGAGG
AAGGAAGACAGTTATGAAGAACAGCTCATTCTGGAAACATACTAATTTTT
CCCAGCCATAAAGAGATTTCCTATTTCTTTTTTTTTTCCATTTACCTTCT
GTTTCCTACCTGAGAAGATTTCATACTTCTAATAACCATTTGTGTACCTA
TTTAAAGACAGTACCAAAGGCATACATTTTAGTGTTTGGAGGACCAAGGG
TCATTTGATGTTTGATGCTTATTGACTATTCGAGGATGACAAGACACCTT
GAGAACACACACACCCACACCCACACCCACACCCTCACCCACCCACCCCA
CCCCCCTCCCCGAAGAAAGCTGTGAAGGAAGAAAGCAGAAAAGAACCTGG
AGTGAGTTGTAACTTAAAATGTTAGTGTTGCATGAAGTGTGTTAAAACAG
GAAGATTTGAGGAAATTGCATACATTTTCTAGATGGCAAAGTATTACTGG
TGACAGTTAATGAAAATGCATATGCATGTGTTTTTAGATTTACAAATTTT
ACTAAGAACTTTTTAAAAATCCCTGAAGGTGTATCAAAAGTTTATCATGC
TTATGAAATAGAGTAGCACTTTCTAACTTTAAAACGGGGAATAATTCTTT
GGATCTTGATTATTGGAAAAGTGAATTATGAATTGCTAGTATAAAACTGT
GGTTTTAAAATATGTCTGCTTTATATTTTTATGTAGCAGATTTACTCCTA
GTTAATAATACTCAAACTTACTGAAAACTAAGGTAATTAAGATAATTCTG
TCCTGATGGGAAGAGGAAAAATAACTTCAGTGTGAAATCTATTATATATT
AGTTGTGGCAAGATTTCTCCCATTGACTTTGACTGGAGACATTTATAGGG
TTAAAATCGGAAATAGCACGGTGAATTTTGAAGTATCCTTGTAGTTGGAA
AGAGTATTATGTTCATATTGCCAAAAAAAAGATGCATGGATGCATTAGAC
TGGATGGAAAATACATGAGAAGTTGGCTAGCCCCCTCTTTGTCAAAACAT
CACTTGGTGGTGATAAAGCTGTTGGAAAACACAGCATTCTAATGTAGTCT
GTAGTTTAATGATAATCTGTGTCTTGAAACATTTAGCGTAGTACTTATAC
AAACCTAGATGGCATAGTGTACTGCATGCCTAGCCTATATAGTATAGCCT
GTTGCTTCTAGGGTGTAAAGCTGTATAGCGTGTTACTATAGGCAGTTGAA
ACAGTGGTATTTATGTATCCTTTTTTTTTTTTTTAAATTCTTTTAAGAGA
CAGGGTCTTGCTCTGTTGCCCAGGCTGGATGCATTGGTGTGATCATAGCT
CACTATAACCTTGAACTCCTAAGTGATCCTCTTTGCCTCAGCCTCCCCAG
TGGCTAGGACTACAGGCACATACTACCACACCTGGCTAATTTTTAACATT
TTTTTGTAGAGATGGAATTTCGCTGTGTTGTCCAGGCTGGTCTTGGAACT
CTTGTGCTGCAGCAATCCACCCGCCTCCCAAAGTGTTAGAATTACAAGCC
ACTTCGCCTGGCTTGTTTACCTAAACATAGAAAAGATCCAGTAAAAATAC
AGAATTAAAATCTTGTGGGGCCACTGTAGCATATGTAGTCCATCTTGACT
GAAATGTCCTTATGCAGTGCATGATTGTACTTCATAATTTTTAAGCACTC
CTCCCTCTTGATTGGTACTTAGTGGATTTTATCATTTTTGTTTCTTCATA
ATTCTTTCTGAAATGTCTACTGGTTGGACCTTTGATCTCCTGAATTGATC
GTGATTTCTTCTGTTGTATTTTTTGTCTTTGTCATTTTTTTGTACTCTAG
GCAGTTTTCTCAATTTTAGTTTCTATTCAACTTTTTGTTTTTATTTATTC
TCTCCAGTATTTATGGAGATACTAAATTGAAGTGTTCTGTTTCTCTCTCC
ACCCTATCCCTAGTTTCAAGTTTTATCTCAGTTTCTATGGAGTCAGTTTT
TTCGTTGCTTTAAAAAAAAATTTTCCTGAAGTGATTGGTAAGTTTTGGCT
AATTGGGAGCACTAGAATTGGGCCCTTAATGGTTGGCAGGGTGTGGTGGA
GGAGAGACAGCCCTTAGTCCAAAGGCTCAGGCCAGAAAAAGAAAGAGGAA
GGCTTTCCTTTTCCTTTCCGGAGCAGGGTTCTGCCCTAGGTCTTGCTTGG
CAGTCTATTTGATTTCTTTAGCAGTTAATGCTCAGTTTTTTGGCATATGT
GGATCTGCCTCCAGAGCAGGTACAAGGTGAGTGAGTCTATGCTGTTACCT
AATTAGATCCCCATTTCTACCCTTTGTTTTTACTTCTCTATCTACTGATA
GGTTTTTACCCTCCTTCACCTCATAGGGTTGCAGTGAAGAGCAAGATGAA
TTTTTATTTATGTTGCATAAATTTTAAAAGCTAAAAAATATATATGTAAT
GTTGGGAAGTCCCAGTGTACAAATGGCTATTGTAAATTTGGAACATGAAC
TTGCTTTTTTCCATTGTAAAAATGAAATCATTATAAATTGCGGTCAAGTT
ACTAGGTCAGCCCACACAGAGTTTACCCAGTAATATGCGTAAATGTTTTG
CCTTTGCATCAACAACAAGGAAAAACAGTACTATAAAAAAATGTTCCTGG
AAGCCGGATGTATCAAAGCACTTCTGAAATAGCTATATAGCCTATAGACA
TGACCAGTTGGTTTCTGAGTCTGTTGACATTGGCCAAAGGAGAAGCTCAG
TGTAGAACATGTTTGGAGTCTCCTTTTGCAGAAATACATTGGAGGCTGGA
GTGGGGAACCAATTTTTCAGAAAGGTGGTGAAGTAGTTACATAGCCACTC
TTTTAAAGACAGTCAAAAGATAGAAACTAAGGCCAGGTGTTGGCTCACAT
CTGAGATAGGAAAATCACTTGAACCTGGGAGGCGGAGGTTGCAGTGAGCC
CAGTATGCACCTCTGCACTCCAGCCTGGTTTGGCAAGAGACCAAAACTCT
GTCTCAAAAAAAAACAAAACATAGTTCACACTTAAATATTTTATTCCATA
TCTTTACATACCCAATATGTTAATTTATAGTTCAAGATGAACTTGTTTGG
GACAGATTTTGTAATAAAGGAAATCGTGTTATTAGAAATATCTAGAGGCC
ATGAGCCCTTAAACTGTTCTAATTTGCAAGTAGTTCCCTGTGTGATGCAG
TTTTTTTCAATATTGCACAATAAAGGCAAAATACGGACAAATTAGATGAT
AAGATTTATATAAATTTTTAAAATATTGATCAAAATATGTATCCATATTG
GTAATATTTGTATTTATAATAAATCATTGCTGTAAATTTGAACTTAGAAA
AATTTTACTAATAAAGGTGCTTTTGTGTTGCAAACTTTCATTTGAAAAGT
AATTTTTCTTTGTACCAAAAAATCTAAAATTCGCTATTCTAGTCACCAAA
ATTTGCTTTATGAAAAATAATTTTTGATGGCACTATATCAGAAAACAACT
TGTTAAAGAAAATGTGGAGTTTTTAAAATCCCACTGTACCTCTGTTATCC
AAAGGGGATCTGTGAATTTTTCTGTGAAAGGTTAAAAAAGGAGAGACCTT
TAGGAATTCAGAGAGCAGCTGATTTTTGAATAGTGTTTTCCCCTCCCTGG
CTTTTATTATTACAACTCTGTGCTTTTTCATCACCATCCTGAATATCTAT
AATTAATATTTATACTATTAATAAAAAGACATTTTTGGTAAGGAGGAGTT
TTCACTGAAGTTCAGCAGTGATGGAGCTGTGGTTGAGGTGTCTGGAGGAG
ACCATGAGGTCTGCGTTTCACTAACCTGGTAAAAGAGGATATGGGTTTTT
TTTGTGGGTGTAATAGTGACATTTAACAGGTATCCCAGTGACTTAGGAGT
ATTAATCAAGCTAAATTTAAATCCTAATGACTTTTGATTAACTTTTTTTA
GGGTATTTGAAGTATACCATACAACTGTTTTGAAAATCCAGCGTGGACA
ATG

[0373] 19) PCSK9. Proprotein convertase subtilisin/kexin type 9, also known as PCSK9, is an enzyme that in humans is encoded by the PCSK9 gene. This gene encodes a proprotein convertase belonging to the proteinase K subfamily of the secretory subtilase family. The encoded protein is synthesized as a soluble zymogen that undergoes autocatalytic intramolecular processing in the endoplasmic reticulum. This protein plays a major regulatory role in cholesterol homeostasis. PCSK9 binds to the epidermal growth factor-like repeat A (EGF-A) domain of the low-density lipoprotein receptor (LDLR), inducing LDLR degradation. Reduced LDLR levels result in decreased metabolism of low-density lipoproteins, which could lead to hypercholesterolemia. Variants of PCSK9 can reduce or increase circulating cholesterol. LDL cholesterol is removed from the blood when it binds to LDL receptors on the surface of liver cells, and is taken inside the cells. When PCSK9 binds to the LDL receptor, the receptor is destroyed along with the LDL. But if PCSK9 does not bind, the receptor can return to the surface of the cell and remove more cholesterol (reviewed in Akram et al, 2010 Arterioscler Thromb Vasc Biol.; 30:1279-1281)

[0374] There are numerous approaches to inhibiting PCSK9 being developed as a means of lowering cholesterol levels (reviewed in Lambert et al., 2012; J Lipid Res. 53(12):2515-24). A number of monoclonal antibodies that bind to PCSK9 near the catalytic domain that interact with the LDLR and hence inhibit the function of PCSK9 are currently in clinical trials including AMG145, 1D05-IgG2, and SAR236553/REGN727 (Aventis/Regeneron). Peptide mimetics and oligonucleotide approaches are also being developed. These include a mimic of the EGFA domain of the LDLR that binds to PCSK9, an antisense PCSK9 oligonucleotide, a locked nucleic acid inhibitor and siRNA approaches.

[0375] Protein: PCSK9 Gene: PCSK9 (Homo sapiens, chromosome 1, 55505149-55530526 [NCBI Reference Sequence: NC_{—}000001.10]; start site location: 55505511; strand: positive)

Gene Identification

| | |
|---|---|
| GeneID | 255738 |
| HGNC | 20001 |
| HPRD | 07080 |
| MIM | 607789 |

Targeted Sequences

| | | | Relative |
|---|---|---|---|
| | | | upstream |
| | | | location |
| | | | to gene |
| Sequence | Design | | start |
| ID No: | ID | Sequence (5′-3′) | site |
| 5235 | | CAGGGCGCGTGAAGGGGCGCGCGG | 120 |
| 5236 | | GACGCGTCCCGGCCCGCCCGAGC | 179 |
| 5285 | | GACGCCTGGGGCGCGCAGATCAC | 341 |
| 5341 | | CAGGCCGGCGCCCTAGGGGCTCC | 494 |
| 5359 | | CACGCCGGCGGCGCCTTGAGCC | 56 |
| 5402 | PC2 | CAGGTTTCGGCCTCGCCCTCCC | 408 |
| 5445 | | CATCGAGCCCGCCATCGCAGCAC | 1307 |
| 5473 | | GAGCGCCTCGACGTCGCTGCGGAAACC | 273 |

Target Shift Sequence

| | | Relative |
|---|---|---|
| | | upstream |
| | | location |
| Sequence | | to gene |
| ID No: | Sequence (5′-3′) | start site |
| 5235 | CAGGGCGCGTGAAGGGGCGCGCGG | 120 |
| 5236 | GACGCGTCCCGGCCCGCCCGAGC | 179 |
| 5237 | ACGCGTCCCGGCCCGCCCGA | 180 |
| 5238 | CGCGTCCCGGCCCGCCCGAG | 181 |
| 5239 | GCGTCCCGGCCCGCCCGAGC | 182 |
| 5240 | CGTCCCGGCCCGCCCGAGCC | 183 |
| 5241 | GTCCCGGCCCGCCCGAGCCA | 184 |
| 5242 | TCCCGGCCCGCCCGAGCCAG | 185 |
| 5243 | CCCGGCCCGCCCGAGCCAGT | 186 |
| 5244 | CCGGCCCGCCCGAGCCAGTC | 187 |
| 5245 | CGGCCCGCCCGAGCCAGTCT | 188 |
| 5246 | GGCCCGCCCGAGCCAGTCTC | 189 |
| 5247 | GCCCGCCCGAGCCAGTCTCA | 190 |
| 5248 | CCCGCCCGAGCCAGTCTCAC | 191 |
| 5249 | CCGCCCGAGCCAGTCTCACT | 192 |
| 5250 | CGCCCGAGCCAGTCTCACTG | 193 |
| 5251 | GCCCGAGCCAGTCTCACTGC | 194 |
| 5252 | CCCGAGCCAGTCTCACTGCC | 195 |
| 5253 | CCGAGCCAGTCTCACTGCCT | 196 |
| 5254 | CGAGCCAGTCTCACTGCCTG | 197 |
| 5255 | CGACGCGTCCCGGCCCGCCC | 178 |
| 5256 | ACGACGCGTCCCGGCCCGCC | 177 |
| 5257 | AACGACGCGTCCCGGCCCGC | 176 |
| 5258 | CAACGACGCGTCCCGGCCCG | 175 |
| 5259 | GCAACGACGCGTCCCGGCCC | 174 |
| 5260 | TGCAACGACGCGTCCCGGCC | 173 |
| 5261 | CTGCAACGACGCGTCCCGGC | 172 |
| 5262 | GCTGCAACGACGCGTCCCGG | 171 |
| 5263 | TGCTGCAACGACGCGTCCCG | 170 |
| 5264 | CTGCTGCAACGACGCGTCCC | 169 |
| 5265 | GCTGCTGCAACGACGCGTCC | 168 |
| 5266 | CGCTGCTGCAACGACGCGTC | 167 |
| 5267 | CCGCTGCTGCAACGACGCGT | 166 |
| 5268 | GCCGCTGCTGCAACGACGCG | 165 |
| 5269 | AGCCGCTGCTGCAACGACGC | 164 |
| 5270 | GAGCCGCTGCTGCAACGACG | 163 |
| 5271 | GGAGCCGCTGCTGCAACGAC | 162 |
| 5272 | GGGAGCCGCTGCTGCAACGA | 161 |
| 5273 | TGGGAGCCGCTGCTGCAACG | 160 |
| 5274 | CTGGGAGCCGCTGCTGCAAC | 159 |
| 5275 | GCTGGGAGCCGCTGCTGCAA | 158 |
| 5276 | AGCTGGGAGCCGCTGCTGCA | 157 |
| 5277 | GAGCTGGGAGCCGCTGCTGC | 156 |
| 5278 | GGAGCTGGGAGCCGCTGCTG | 155 |
| 5279 | GGGAGCTGGGAGCCGCTGCT | 154 |
| 5280 | TGGGAGCTGGGAGCCGCTGC | 153 |
| 5281 | CTGGGAGCTGGGAGCCGCTG | 152 |
| 5282 | GCTGGGAGCTGGGAGCCGCT | 151 |
| 5283 | GGCTGGGAGCTGGGAGCCGC | 150 |
| 5284 | TGGCTGGGAGCTGGGAGCCG | 149 |
| 5285 | GACGCCTGGGGCGCGCAGATCAC | 319 |
| 5286 | ACGCCTGGGGCGCGCAGATC | 320 |
| 5287 | CGCCTGGGGCGCGCAGATCA | 321 |
| 5288 | GCCTGGGGCGCGCAGATCAC | 322 |
| 5289 | CCTGGGGCGCGCAGATCACG | 323 |
| 5290 | CTGGGGCGCGCAGATCACGC | 324 |
| 5291 | TGGGGCGCGCAGATCACGCC | 325 |
| 5292 | GGGGCGCGCAGATCACGCCA | 326 |
| 5293 | GGGCGCGCAGATCACGCCAC | 327 |
| 5294 | GGCGCGCAGATCACGCCACC | 328 |
| 5295 | GCGCGCAGATCACGCCACCA | 329 |
| 5296 | CGCGCAGATCACGCCACCAG | 330 |
| 5297 | GCGCAGATCACGCCACCAGA | 331 |
| 5298 | CGCAGATCACGCCACCAGAG | 332 |
| 5299 | GCAGATCACGCCACCAGAGC | 333 |
| 5300 | CAGATCACGCCACCAGAGCC | 334 |
| 5301 | AGATCACGCCACCAGAGCCC | 335 |
| 5302 | GATCACGCCACCAGAGCCCC | 336 |
| 5303 | ATCACGCCACCAGAGCCCCA | 337 |
| 5304 | TCACGCCACCAGAGCCCCAT | 338 |
| 5305 | CACGCCACCAGAGCCCCATC | 339 |
| 5306 | ACGCCACCAGAGCCCCATCG | 340 |
| 5307 | CGCCACCAGAGCCCCATCGG | 341 |
| 5308 | GCCACCAGAGCCCCATCGGA | 342 |
| 5309 | CCACCAGAGCCCCATCGGAC | 343 |
| 5310 | CACCAGAGCCCCATCGGACG | 344 |
| 5311 | ACCAGAGCCCCATCGGACGA | 345 |
| 5312 | CCAGAGCCCCATCGGACGAT | 346 |
| 5313 | CAGAGCCCCATCGGACGATC | 347 |
| 5314 | AGAGCCCCATCGGACGATCC | 348 |
| 5315 | GAGCCCCATCGGACGATCCT | 349 |
| 5316 | AGCCCCATCGGACGATCCTA | 350 |
| 5317 | GCCCCATCGGACGATCCTAT | 351 |
| 5318 | CCCCATCGGACGATCCTATC | 352 |
| 5319 | CCCATCGGACGATCCTATCT | 353 |
| 5320 | CCATCGGACGATCCTATCTG | 354 |
| 5321 | CATCGGACGATCCTATCTGA | 355 |
| 5322 | ATCGGACGATCCTATCTGAT | 356 |
| 5323 | TCGGACGATCCTATCTGATT | 357 |
| 5324 | CGGACGATCCTATCTGATTA | 358 |
| 5325 | TGACGCCTGGGGCGCGCAGA | 318 |
| 5326 | TTGACGCCTGGGGCGCGCAG | 317 |
| 5327 | CTTGACGCCTGGGGCGCGCA | 316 |
| 5328 | GCTTGACGCCTGGGGCGCGC | 315 |
| 5329 | TGCTTGACGCCTGGGGCGCG | 314 |
| 5330 | GTGCTTGACGCCTGGGGCGC | 313 |
| 5331 | GGTGCTTGACGCCTGGGGCG | 312 |
| 5332 | GGGTGCTTGACGCCTGGGGC | 311 |
| 5333 | TGGGTGCTTGACGCCTGGGG | 310 |
| 5334 | GTGGGTGCTTGACGCCTGGG | 309 |
| 5335 | TGTGGGTGCTTGACGCCTGG | 308 |
| 5336 | GTGTGGGTGCTTGACGCCTG | 307 |
| 5337 | GGTGTGGGTGCTTGACGCCT | 306 |
| 5338 | GGGTGTGGGTGCTTGACGCC | 305 |
| 5339 | AGGGTGTGGGTGCTTGACGC | 304 |
| 5340 | TAGGGTGTGGGTGCTTGACG | 303 |
| 5341 | CAGGCCGGCGCCCTAGGGGCTCC | 494 |
| 5342 | AGGCCGGCGCCCTAGGGGCT | 495 |
| 5343 | GGCCGGCGCCCTAGGGGCTC | 496 |
| 5344 | GCCGGCGCCCTAGGGGCTCC | 497 |
| 5345 | CCGGCGCCCTAGGGGCTCCT | 498 |
| 5346 | CGGCGCCCTAGGGGCTCCTC | 499 |
| 5347 | GGCGCCCTAGGGGCTCCTCC | 500 |
| 5348 | GCGCCCTAGGGGCTCCTCCT | 501 |
| 5349 | CGCCCTAGGGGCTCCTCCTC | 502 |
| 5350 | GCAGGCCGGCGCCCTAGGGG | 493 |
| 5351 | GGCAGGCCGGCGCCCTAGGG | 492 |
| 5352 | AGGCAGGCCGGCGCCCTAGG | 491 |
| 5353 | AAGGCAGGCCGGCGCCCTAG | 490 |
| 5354 | GAAGGCAGGCCGGCGCCCTA | 489 |
| 5355 | GGAAGGCAGGCCGGCGCCCT | 488 |
| 5356 | TGGAAGGCAGGCCGGCGCCC | 487 |
| 5357 | CTGGAAGGCAGGCCGGCGCC | 486 |
| 5358 | GCTGGAAGGCAGGCCGGCGC | 485 |
| 5359 | CACGCCGGCGGCGCCTTGAGCC | 58 |
| 5360 | ACGCCGGCGGCGCCTTGAGC | 59 |
| 5361 | CGCCGGCGGCGCCTTGAGCC | 60 |
| 5362 | GCCGGCGGCGCCTTGAGCCT | 61 |
| 5363 | CCGGCGGCGCCTTGAGCCTT | 62 |
| 5364 | CGGCGGCGCCTTGAGCCTTG | 63 |
| 5365 | GGCGGCGCCTTGAGCCTTGC | 64 |
| 5366 | GCGGCGCCTTGAGCCTTGCG | 65 |
| 5367 | CGGCGCCTTGAGCCTTGCGG | 66 |
| 5368 | GGCGCCTTGAGCCTTGCGGT | 67 |
| 5369 | GCGCCTTGAGCCTTGCGGTG | 68 |
| 5370 | CGCCTTGAGCCTTGCGGTGG | 69 |
| 5371 | GCCTTGAGCCTTGCGGTGGG | 70 |
| 5372 | CCTTGAGCCTTGCGGTGGGG | 71 |
| 5373 | CTTGAGCCTTGCGGTGGGGA | 72 |
| 5374 | TTGAGCCTTGCGGTGGGGAG | 73 |
| 5375 | TGAGCCTTGCGGTGGGGAGG | 74 |
| 5376 | CCACGCCGGCGGCGCCTTGA | 57 |
| 5377 | TCCACGCCGGCGGCGCCTTG | 56 |
| 5378 | GTCCACGCCGGCGGCGCCTT | 55 |
| 5379 | GGTCCACGCCGGCGGCGCCT | 54 |
| 5380 | CGGTCCACGCCGGCGGCGCC | 53 |
| 5381 | GCGGTCCACGCCGGCGGCGC | 52 |
| 5382 | CGCGGTCCACGCCGGCGGCG | 51 |
| 5383 | GCGCGGTCCACGCCGGCGGC | 50 |
| 5384 | TGCGCGGTCCACGCCGGCGG | 49 |
| 5385 | GTGCGCGGTCCACGCCGGCG | 48 |
| 5386 | CGTGCGCGGTCCACGCCGGC | 47 |
| 5387 | CCGTGCGCGGTCCACGCCGG | 46 |
| 5388 | GCCGTGCGCGGTCCACGCCG | 45 |
| 5389 | GGCCGTGCGCGGTCCACGCC | 44 |
| 5390 | AGGCCGTGCGCGGTCCACGC | 43 |
| 5391 | GAGGCCGTGCGCGGTCCACG | 42 |
| 5392 | AGAGGCCGTGCGCGGTCCAC | 41 |
| 5393 | TAGAGGCCGTGCGCGGTCCA | 40 |
| 5394 | CTAGAGGCCGTGCGCGGTCC | 39 |
| 5395 | CCTAGAGGCCGTGCGCGGTC | 38 |
| 5396 | ACCTAGAGGCCGTGCGCGGT | 37 |
| 5397 | GACCTAGAGGCCGTGCGCGG | 36 |
| 5398 | AGACCTAGAGGCCGTGCGCG | 35 |
| 5399 | GAGACCTAGAGGCCGTGCGC | 34 |
| 5400 | GGAGACCTAGAGGCCGTGCG | 33 |
| 5401 | AGGAGACCTAGAGGCCGTGC | 32 |
| 5402 | CAGGTTTCGGCCTCGCCCTCCC | 408 |
| 5403 | AGGTTTCGGCCTCGCCCTCC | 409 |
| 5404 | GGTTTCGGCCTCGCCCTCCC | 410 |
| 5405 | GTTTCGGCCTCGCCCTCCCC | 411 |
| 5406 | TTTCGGCCTCGCCCTCCCCA | 412 |
| 5407 | TTCGGCCTCGCCCTCCCCAA | 413 |
| 5408 | TCGGCCTCGCCCTCCCCAAA | 414 |
| 5409 | CGGCCTCGCCCTCCCCAAAC | 415 |
| 5410 | GGCCTCGCCCTCCCCAAACA | 416 |
| 5411 | GCCTCGCCCTCCCCAAACAG | 417 |
| 5412 | CCTCGCCCTCCCCAAACAGC | 418 |
| 5413 | CTCGCCCTCCCCAAACAGCG | 419 |
| 5414 | TCGCCCTCCCCAAACAGCGT | 420 |
| 5415 | CGCCCTCCCCAAACAGCGTC | 421 |
| 5416 | GCCCTCCCCAAACAGCGTCA | 422 |
| 5417 | CCCTCCCCAAACAGCGTCAG | 423 |
| 5418 | CCTCCCCAAACAGCGTCAGA | 424 |
| 5419 | CTCCCCAAACAGCGTCAGAT | 425 |
| 5420 | TCCCCAAACAGCGTCAGATT | 426 |
| 5421 | CCCCAAACAGCGTCAGATTA | 427 |
| 5422 | CCCAAACAGCGTCAGATTAC | 428 |
| 5423 | CCAAACAGCGTCAGATTACG | 429 |
| 5424 | CAAACAGCGTCAGATTACGC | 430 |
| 5425 | AAACAGCGTCAGATTACGCG | 431 |
| 5426 | AACAGCGTCAGATTACGCGC | 432 |
| 5427 | ACAGCGTCAGATTACGCGCA | 433 |
| 5428 | CAGCGTCAGATTACGCGCAG | 434 |
| 5429 | AGCGTCAGATTACGCGCAGA | 435 |
| 5430 | GCGTCAGATTACGCGCAGAG | 436 |
| 5431 | CGTCAGATTACGCGCAGAGG | 437 |
| 5432 | GTCAGATTACGCGCAGAGGG | 438 |
| 5433 | TCAGATTACGCGCAGAGGGA | 439 |
| 5434 | TCAGGTTTCGGCCTCGCCCT | 407 |
| 5435 | ATCAGGTTTCGGCCTCGCCC | 406 |
| 5436 | GATCAGGTTTCGGCCTCGCC | 405 |
| 5437 | GGATCAGGTTTCGGCCTCGC | 404 |
| 5438 | AGGATCAGGTTTCGGCCTCG | 403 |
| 5439 | GAGGATCAGGTTTCGGCCTC | 402 |
| 5440 | GGAGGATCAGGTTTCGGCCT | 401 |
| 5441 | TGGAGGATCAGGTTTCGGCC | 400 |
| 5442 | CTGGAGGATCAGGTTTCGGC | 399 |
| 5443 | ACTGGAGGATCAGGTTTCGG | 398 |
| 5444 | GACTGGAGGATCAGGTTTCG | 397 |
| 5445 | CATCGAGCCCGCCATCGCAGCAC | 1307 |
| 5446 | ATCGAGCCCGCCATCGCAGC | 1308 |
| 5447 | TCGAGCCCGCCATCGCAGCA | 1309 |
| 5448 | CGAGCCCGCCATCGCAGCAC | 1310 |
| 5449 | GAGCCCGCCATCGCAGCACA | 1311 |
| 5450 | AGCCCGCCATCGCAGCACAG | 1312 |
| 5451 | GCCCGCCATCGCAGCACAGA | 1313 |
| 5452 | CCCGCCATCGCAGCACAGAG | 1314 |
| 5453 | CCGCCATCGCAGCACAGAGT | 1315 |
| 5454 | CGCCATCGCAGCACAGAGTA | 1316 |
| 5455 | GCCATCGCAGCACAGAGTAG | 1317 |
| 5456 | CCATCGCAGCACAGAGTAGG | 1318 |
| 5457 | CATCGCAGCACAGAGTAGGA | 1319 |
| 5458 | CCATCGAGCCCGCCATCGCA | 1306 |
| 5459 | CCCATCGAGCCCGCCATCGC | 1305 |
| 5460 | CCCCATCGAGCCCGCCATCG | 1304 |
| 5461 | TCCCCATCGAGCCCGCCATC | 1303 |
| 5462 | ATCCCCATCGAGCCCGCCAT | 1302 |
| 5463 | TATCCCCATCGAGCCCGCCA | 1301 |
| 5464 | TTATCCCCATCGAGCCCGCC | 1300 |
| 5465 | GTTATCCCCATCGAGCCCGC | 1299 |
| 5466 | AGTTATCCCCATCGAGCCCG | 1298 |
| 5467 | GAGTTATCCCCATCGAGCCC | 1297 |
| 5468 | AGAGTTATCCCCATCGAGCC | 1296 |
| 5469 | CAGAGTTATCCCCATCGAGC | 1295 |
| 5470 | TCAGAGTTATCCCCATCGAG | 1294 |
| 5471 | GTCAGAGTTATCCCCATCGA | 1293 |
| 5472 | GGTCAGAGTTATCCCCATCG | 1292 |
| 5473 | GAGCGCCTCGACGTCGCTGCGGAAACC | 273 |
| 5474 | AGCGCCTCGACGTCGCTGCG | 274 |
| 5475 | GCGCCTCGACGTCGCTGCGG | 275 |
| 5476 | CGCCTCGACGTCGCTGCGGA | 276 |
| 5477 | GCCTCGACGTCGCTGCGGAA | 277 |
| 5478 | CCTCGACGTCGCTGCGGAAA | 278 |
| 5479 | CTCGACGTCGCTGCGGAAAC | 279 |
| 5480 | TCGACGTCGCTGCGGAAACC | 280 |
| 5481 | CGACGTCGCTGCGGAAACCT | 281 |
| 5482 | GACGTCGCTGCGGAAACCTT | 282 |
| 5483 | ACGTCGCTGCGGAAACCTTC | 283 |
| 5484 | CGTCGCTGCGGAAACCTTCT | 284 |
| 5485 | GTCGCTGCGGAAACCTTCTA | 285 |
| 5486 | TCGCTGCGGAAACCTTCTAG | 286 |
| 5487 | CGCTGCGGAAACCTTCTAGG | 287 |
| 5488 | GCTGCGGAAACCTTCTAGGG | 288 |
| 5489 | CTGCGGAAACCTTCTAGGGT | 289 |
| 5490 | TGCGGAAACCTTCTAGGGTG | 290 |
| 5491 | GCGGAAACCTTCTAGGGTGT | 291 |
| 5492 | CGGAAACCTTCTAGGGTGTG | 292 |
| 5493 | TGAGCGCCTCGACGTCGCTG | 272 |
| 5494 | ATGAGCGCCTCGACGTCGCT | 271 |
| 5495 | CATGAGCGCCTCGACGTCGC | 270 |
| 5496 | CCATGAGCGCCTCGACGTCG | 269 |
| 5497 | ACCATGAGCGCCTCGACGTC | 268 |
| 5498 | AACCATGAGCGCCTCGACGT | 267 |
| 5499 | CAACCATGAGCGCCTCGACG | 266 |
| 5500 | GCAACCATGAGCGCCTCGAC | 265 |
| 5501 | TGCAACCATGAGCGCCTCGA | 264 |
| 5502 | CTGCAACCATGAGCGCCTCG | 263 |
| 5503 | CCTGCAACCATGAGCGCCTC | 262 |
| 5504 | GCCTGCAACCATGAGCGCCT | 261 |
| 5505 | CGCCTGCAACCATGAGCGCC | 260 |
| 5506 | CCGCCTGCAACCATGAGCGC | 259 |
| 5507 | CCCGCCTGCAACCATGAGCG | 258 |
| 5508 | GCCCGCCTGCAACCATGAGC | 257 |
| 5509 | CGCCCGCCTGCAACCATGAG | 256 |
| 5510 | GCGCCCGCCTGCAACCATGA | 255 |
| 5511 | GGCGCCCGCCTGCAACCATG | 254 |
| 5512 | CGGCGCCCGCCTGCAACCAT | 253 |
| 5513 | GCGGCGCCCGCCTGCAACCA | 252 |
| 5514 | GGCGGCGCCCGCCTGCAACC | 251 |
| 5515 | CGGCGGCGCCCGCCTGCAAC | 250 |
| 5516 | ACGGCGGCGCCCGCCTGCAA | 249 |
| 5517 | AACGGCGGCGCCCGCCTGCA | 248 |
| 5518 | GAACGGCGGCGCCCGCCTGC | 247 |
| 5519 | TGAACGGCGGCGCCCGCCTG | 246 |
| 5520 | CTGAACGGCGGCGCCCGCCT | 245 |
| 5521 | ACTGAACGGCGGCGCCCGCC | 244 |
| 5522 | AACTGAACGGCGGCGCCCGC | 243 |
| 5523 | GAACTGAACGGCGGCGCCCG | 242 |
| 5524 | TGAACTGAACGGCGGCGCCC | 241 |
| 5525 | CTGAACTGAACGGCGGCGCC | 240 |
| 5526 | CCTGAACTGAACGGCGGCGC | 239 |
| 5527 | CCCTGAACTGAACGGCGGCG | 238 |
| 5528 | ACCCTGAACTGAACGGCGGC | 237 |
| 5529 | GACCCTGAACTGAACGGCGG | 236 |
| 5530 | AGACCCTGAACTGAACGGCG | 235 |
| 5531 | CAGACCCTGAACTGAACGGC | 234 |
| 5532 | TCAGACCCTGAACTGAACGG | 233 |
| 5533 | CTCAGACCCTGAACTGAACG | 232 |

Hot Zones (Relative upstream location to gene start site)
1-800
1100-1450

### Examples

Genetic Code (5′ Upstream Region)

(SEQ ID NO: 11968)

CCATCCTGGGCCATTGGGCCAGCTCCAGCCTCATCCTTGAATGGTGGGTG
TACATCGCTGGGGTCCTTGCTAGATTATATTAGGGCCTCCACACACTTTA
GTTGCTCTCCGTTTGCACAATGATTTCTATATCATTAGTACCTCTTTGTC
CACTTGCCTAATTATTTCCTTAGGATAAATTCCTAAGAAATCAAATAGCT
AGGTCAGTATATAGCACATTTTCACAGTTTGCTACTGACTAGAGATATTA
AAGGTACAAAAACAGCCAGAATTAGATGTAGAGTCGCAAGGGAGTTTTGT
TACTAAGACGTCATTTCTAATCAGGGAGAAAAAATGAGTTACGGAATAAA
CGGTATTGGAACAATAGGCTAGCCTTCTGGAGAAAAATAACCTCACTCCT
TATACAAAAGTAAATCCCAGTGGAAGCCAAGATATTAAAAAAAGATTTAA
AAAAGGAGGACAATTTTTATATGATCTTGATAAGGAGGAGGCCTTTCTAA
GCACAGTACAAAATCAAGAAGTCATGAAATAAAAGGCTGATAAGTTTGAC
TCCATGAAAATTAAAATTTTCTATGGAAAAAAATACAATAAAGTCAAAAA
TCAATCAACAAACTGGAAAATAGATTTGCAACATACATAAGAGACAGCAG
GCTAATTTTGGTATTATACATAAAAAGCTATTACAAATCATCAAACAAAA
GCTCCACAGCCAAAATGAAAAAATGAAGAGACAGTTCAAAGACAAACAAA
TGTAGATAATTGTTTAACTTAAGGAAAGGTCAAAATATTTGGCAACTCTG
TGTTGGCCTGGGTGTGACCATGAGCGGTAGTTGCCAGTGGTATTCACAAA
TATACCCTTTCTCCTCCTTCTGGGCACTTGGTGTGATTGCAGTTTCCTAC
ATTTGACCTTAGGTGTGGTCATGTGTCTCGCTTAGGAGAAGGAAATGTGA
ACGGAAGTGTTGTGGGTCACTTTTGTGTGGAAGCTGCATGGAGTCACCTC
TTTGCTTTCCGTCAGCCTCAGTGTTCAGCAATGTTCTGAATGATGGTTGC
TTTATCAGTCTGGTTCTGGGGTGAGGGTAATGAAGTAGTGAAGCAAAGTC
CTTGATGGACATGTGAGGTGAGACAGAAATAAACCTTTGACATTTCAAGC
CCCTGAGATTTGGGGCGTGCATGTGCTGGAAGCAGAACCTAGCCTATTCT
GATGGATTCCTCCAGCACTGCTCGTGGGAAGACATCATCAATATAGAGCA
TTCATGTGCCCTTTATCTCGAAATTCCACTTCCAGGAATTTATGAAACAG
ATACTCTCACATGTGCAAACAGCTATGGATAAGGACAGACATGGCAACTT
GGATTGCAATAGCAAAAGACAGAAACAACCAACGGAAACACCAACCAATA
GGAAATTGGCTAAAGACATTGTGAAACATACATAGAATGAAATAATCTGC
AACCAGAAAAATAAGGCAGTAGATGTATGTGTACCAGTGTGGTTTTTATT
CCGAGATTAGGGCTAGGTTAAGACGTCAGATTAAGTTGTCCCTCTCCACC
CCACCAATATAAATAAAAAGTTAAAAGTAAATCATAAACTATTTTTACAA
TTTTAAAAAGTGGGTTAAAGAGCCCATCCAAGTAGTTTTATAAAAGTAGA
CTATCTCCGAAAAGATACCCAATAAATAGGTATATTACTTTCCTGGGGCT
GTTATAACAAGTTTCTACAAATTTGCTGGCTTCAAATAACAAAAACGTAT
TCTCTTGCAGTTATGGAAGCCAGAAGTATGGAATGAAGGGTTGCAGGGTG
GTGCCCTCTCCCAAAGCTCTAGGGGAGGAACATTCCTTGCTTCTTCCAGC
TCCTTTGGGGGCTCCTGGCATTCCTTGGCTTATGTCGGCACAGCTCTAAT
CGGCGCCTCCATTGTTACATAGGTGTTTCTGTGTCTCAAGTATCTCTCCC
CTTTCTCTTCTGATATCAGTCATTGGATTTAGGGACCATCCTAAACCCAG
GATAATCTCCTCATGAGATCCTTAGGTCAATTACATCTGCAAAGATCTCA
TTTCCAAATAAGGTCACATTCAAAAGTACCAGGGGTTAGTCTTAGACTTA
TCTTTTTGGGGGACACGATTCAACCCACTACCGTGGGTAACAGTGGTTTT
CCCTCAGAAGGTGGTGGTTCAGGAGTGGGAGGAAGATGAACTTTTCACTG
TATATCCTTTCAAACTATTCACGTTTTAAAAAAAACATTTTCATGTAAAT
TTAAAAAAATTGAACATTCACACAAAAAGATGCCCCCTCCCTTGCAAAAA
AGAGTATGCCCGTTCAAAATGTTGAAATGTACACTCACAGCAATGGTGGC
TGCAGACTCCAAGTTTCTGAGGTTGGAGAAGGTAGCCAGGGAGCATAAAA
GTGAGTTCTATCTACTCATTCAGTCTATGAGGGGAAGGCAATGGCTAGAA
AAGCATTTTGAGGGACAGTAAAAGTGGCATTTTTAGAGGGAGGAAGCCTT
GAGGATGCTTGTGGGGTGAAGGGAAAGAATAACTCAGGAAGAGGCATTTA
GGGATAAGAGGAGGAGAGGAGATAGTGGAGGTAGGTGATCCCTGCGGAGG
CCAGATTGGGGCAGGGGAGTGTCAGCTGAGTATAAGAGGATGGTCCCCTC
TGCCCTGAAGGAGGAAGGCAGGAGGGGAAAAGGATGGGTGTTGACCCAGA
AAGCACTTGTGGTGGAGGGGAGGCCCCAGAAGAGGCTTCTGACTTACCCT
GATTGCTGGTACCTCTCAGGGGAGCTGGCTGCTTATTTGCTGGCCAGGGT
GTGGGGGAACCCATTTGAGAAGAGGGAGAAGGTGACACAATTCCTTTGGG
CAACTTATGGGAGGGGTAATTGGTGAGGGATGAAAGCCCTGCCAAGTGGC
AGGAGGCCCAGCTGGGGCTGCCCCTCATAAGAGTGCAGTGGAGGATATGG
GATGAGAAGTGACTGCCCCTCTGGTTCCATCTGTCGCAGAGCCCAGGGTG
CTTCCTTCCTCCCCCACCTCCCTCAGAACACACCCACTGCATGCTGGACA
GCAGCCCCCTTCCTGGGCCTGGGGACATCCATGTCCCTCTGTGCACAGGC
TTCATCATTCTCTGGGTGCACGGTAACGACCCCGGTAGGTGAGAGGCCAA
GGTCCCAAAGGGGAGCAGCAGGGAAAGTTAGCTCCCATCTATTCTTGCTC
CAGGGGAGGCCTTTGATGAGGAAGCTGCCAAAAGCACATTGCAAATACAA
TTCCAATTACAGGCAACAGGAAGGAGAACCACCTCTGCCACCTCTGTCAG
CAAACCATGAGCTCCTACTCTGTGCTGCGATGGCGGGCTCGATGGGGATA
ACTCTGACCTTACCTCATGGAGTCACTGTCAACCCACTGGTTGCACTGTC
TTTGTGCACTGGCTCTCTGGAGTGAGGTCTTTGCAAACAAAGTGGAAAGA
GCATCAACTTTGGACTCCAGCACCTAGATTCAGAGCAGGCCATTTCACTC
GGAATCTGCTGTGCATCTGCAAGGGAGGATCATAAATTCGCCTTTGTTTC
TTCCCAGTATCGACAGCCCTTCCAGAAAGAGCAAGCCTCATGTCATGCCA
CATGTACAATCTGAGGCCAGGAGCTCTCTTTCCCCTTTTCATCCTCCTGC
CTGGTACACAATAGGTGTTTACTGGATGCTTGTCCAGTTGATTTCTTGAA
CATGGTGTGTAAAAGGAATCTTTGCAAATTGAATCTTCTGGAAAGCTGAG
CTTGTGCCTACCATAGAATTCTGAATGTACCTATATGACGTCTTTGCAAA
CTTAAAACCTGAATCTTTGTAGTATAAATCCCTTGAAATGCATGTAGGCT
GGACATCAAAAGCAAGCAATCTCTTCAAGGAGCAGCTAGTTGGTAAGGTC
AGTGTGCAGGGTGCATAAAGGGCAGAGGCCGGAGGGGGTCCAGGCTAAGT
TTAGAAGGCTGCCAGGTTAAGGCCAGTGGAAAGAATTCGGTGGGCAGCGA
GGAGTCCACAGTAGGATTGATTCAGAAGTCTCACTGGTCAGCAGGAGACA
AGGTGGACCCAGGAAACACTGAAAAGGTGGGCCCGGCAGAACTTGGAGTC
TGGCATCCCACGCAGGGTGAGAGGCGGGAGAGGAGGAGCCCCTAGGGCGC
CGGCCTGCCTTCCAGCCCAGTTAGGATTTGGGAGTTTTTTCTTCCCTCTG
CGCGTAATCTGACGCTGTTTGGGGAGGGCGAGGCCGAAACCTGATCCTCC
AGTCCGGGGGTTCCGTTAATGTTTAATCAGATAGGATCGTCCGATGGGGC
TCTGGTGGCGTGATCTGCGCGCCCCAGGCGTCAAGCACCCACACCCTAGA
AGGTTTCCGCAGCGACGTCGAGGCGCTCATGGTTGCAGGCGGGCGCCGCC
GTTCAGTTCAGGGTCTGAGCCTGGAGGAGTGAGCCAGGCAGTGAGACTGG
CTCGGGCGGGCCGGGACGCGTCGTTGCAGCAGCGGCTCCCAGCTCCCAGC
CAGGATTCCGCGCGCCCCTTCACGCGCCCTGCTCCTGAACTTCAGCTCCT
GCACAGTCCTCCCCACCGCAAGGCTCAAGGCGCCGCCGGCGTGGACCGCG
CACGGCCTCTAGGTCTCCTCGCCAGGACAGCAACCTCTCCCCTGGCCCTC
ATG

[0377] 20) MEK1. MEK1 (MAP2K1) Mitogen-activated protein kinase kinase 1. Dual specificity protein kinases act as an essential component of the MAP kinase signal transduction pathway and serves as an integration point for multiple biochemical signals. MEK1 and MEK2 are members of the dual specificity protein kinase family, which act as a mitogen-activated protein (MAP) kinase kinases and as extracellular signal-regulated kinases (ERKs). Binding of extracellular ligands such as growth factors, cytokines and hormones to their cell-surface receptors activates RAS and this initiates RAF1 activation. RAF1 then further activates the dual-specificity protein kinases MAP2K1/MEK1 and MAP2K2/MEK2. Both MAP2K1/MEK1 and MAP2K2/MEK2 function specifically in the MAPK/ERK cascade, and catalyze the concomitant phosphorylation of a threonine and a tyrosine residue in a Thr-Glu-Tyr sequence located in the extracellular signal-regulated kinases MAPK3/ERK1 and MAPK1/ERK2, leading to their activation and further transduction of the signal within the MAPK/ERK cascade. Depending on the cellular context, this pathway mediates diverse biological functions such as cell growth and proliferation, adhesion, survival and differentiation, predominantly through the regulation of transcription, metabolism and cytoskeletal rearrangements (reviewed by Roberts and Der; 2007 Oncogene 26, 3291-3310).

[0378] Genetic alterations that activate the mitogen-activated protein kinase (MAP kinase) pathway occur commonly in cancer. For example, the majority of melanomas harbor mutations in the BRAF oncogene, which confers enhanced sensitivity to pharmacologic MAP kinase inhibition (e.g., RAF or MEK inhibitors). Most mutations conferring resistance to MEK inhibition in vitro populated the allosteric drug binding pocket or alpha-helix C and showed robust (approximately 100-fold) resistance to allosteric MEK inhibition (reviewed in Emery et al, 2009; Proc Natl Acad Sci.; 106(48):20411-20416). Other mutations affected MEK1 codons located within or abutting the N-terminal negative regulatory helix (helix A), which also undergo gain-of-function germline mutations in cardiofaciocutaneous (CFC) syndrome. One target of the MAPK/ERK cascade is peroxisome proliferator-activated receptor gamma (PPARG), a nuclear receptor that promotes differentiation and apoptosis. MAP2K1/MEK1 has been shown to export PPARG from the nucleus. The MAPK/ERK cascade is also involved in the regulation of endosomal dynamics, including lysosome processing and endosome cycling through the perinuclear recycling compartment (PNRC), as well as in the fragmentation of the Golgi apparatus during mitosis.

[0379] Protein: MEK1 Gene: MAP2K1 (Homo sapiens, chromosome 15, 66679211-66783882 [NCBI Reference Sequence: NC_{—}000015.9]; start site location: 66679686; strand: positive)

Gene Identification

| | |
|---|---|
| GeneID | 5604 |
| HGNC | 6840 |
| HPRD | 01469 |
| MIM | 176872 |

Targeted Sequences

| | | | Relative |
|---|---|---|---|
| | | | upstream |
| | | | location |
| | | | to gene |
| Sequence | Design | | start |
| ID No: | ID | Sequence (5′-3′) | site |
| 5534 | | CAAGTCCGGGCCGCGGGCCCCGGGGC | 93 |
| 5716 | MEK1_2 | GCGCCCCGCGCGGTCCCGTCAGCGC | 133 |
| 5898 | | GCGGAGCGGGCTGAACGTGCG | 249 |
| 5900 | | GACTGGAGGCCGGGGGAGGGGCGGGG | 433 |
| 5901 | | GACCCGGGTAACGCGCTTCCAAC | 5 |
| 5924 | MEK1_1 | CACTCGGCTCCGCCCCTATTGC | 507 |
| 6000 | | TACGTCACGGGAGCGCGGCGCAC | 578 |
| 6077 | | GTCGCGGACGCCGTGGCGCCCTCTGTC | 619 |
| 6154 | | CACTCGCCGTCATGCCCGGATCC | 1183 |

Target Shift Sequences

| | | Relative |
|---|---|---|
| | | upstream |
| | | location |
| Sequence | | to gene |
| ID No: | Sequence (5′-3′) | start site |
| 5534 | CAAGTCCGGGCCGCGGGCCCCGGGGC | 93 |
| 5535 | AAGTCCGGGCCGCGGGCCCC | 94 |
| 5536 | AGTCCGGGCCGCGGGCCCCG | 95 |
| 5537 | GTCCGGGCCGCGGGCCCCGG | 96 |
| 5538 | TCCGGGCCGCGGGCCCCGGG | 97 |
| 5539 | CCGGGCCGCGGGCCCCGGGG | 98 |
| 5540 | CGGGCCGCGGGCCCCGGGGC | 99 |
| 5541 | GGGCCGCGGGCCCCGGGGCT | 100 |
| 5542 | GGCCGCGGGCCCCGGGGCTG | 101 |
| 5543 | GCCGCGGGCCCCGGGGCTGC | 102 |
| 5544 | CCGCGGGCCCCGGGGCTGCC | 103 |
| 5545 | CGCGGGCCCCGGGGCTGCCT | 104 |
| 5546 | GCGGGCCCCGGGGCTGCCTT | 105 |
| 5547 | CGGGCCCCGGGGCTGCCTTC | 106 |
| 5548 | GGGCCCCGGGGCTGCCTTCA | 107 |
| 5549 | GGCCCCGGGGCTGCCTTCAG | 108 |
| 5550 | GCCCCGGGGCTGCCTTCAGC | 109 |
| 5551 | CCCCGGGGCTGCCTTCAGCG | 110 |
| 5552 | CCCGGGGCTGCCTTCAGCGG | 111 |
| 5553 | CCGGGGCTGCCTTCAGCGGG | 112 |
| 5554 | CGGGGCTGCCTTCAGCGGGT | 113 |
| 5555 | GGGGCTGCCTTCAGCGGGTG | 114 |
| 5556 | GGGCTGCCTTCAGCGGGTGC | 115 |
| 5557 | GGCTGCCTTCAGCGGGTGCG | 116 |
| 5558 | GCTGCCTTCAGCGGGTGCGC | 117 |
| 5559 | CTGCCTTCAGCGGGTGCGCC | 118 |
| 5560 | TGCCTTCAGCGGGTGCGCCC | 119 |
| 5561 | GCCTTCAGCGGGTGCGCCCC | 120 |
| 5562 | CCTTCAGCGGGTGCGCCCCG | 121 |
| 5563 | CTTCAGCGGGTGCGCCCCGC | 122 |
| 5564 | TTCAGCGGGTGCGCCCCGCG | 123 |
| 5565 | TCAGCGGGTGCGCCCCGCGC | 124 |
| 5566 | CAGCGGGTGCGCCCCGCGCG | 125 |
| 5567 | AGCGGGTGCGCCCCGCGCGG | 126 |
| 5568 | GCGGGTGCGCCCCGCGCGGT | 127 |
| 5569 | CGGGTGCGCCCCGCGCGGTC | 128 |
| 5570 | GGGTGCGCCCCGCGCGGTCC | 129 |
| 5571 | GGTGCGCCCCGCGCGGTCCC | 130 |
| 5572 | GTGCGCCCCGCGCGGTCCCG | 131 |
| 5573 | TGCGCCCCGCGCGGTCCCGT | 132 |
| 5574 | GCGCCCCGCGCGGTCCCGTC | 133 |
| 5575 | CGCCCCGCGCGGTCCCGTCA | 134 |
| 5576 | GCCCCGCGCGGTCCCGTCAG | 135 |
| 5577 | CCCCGCGCGGTCCCGTCAGC | 136 |
| 5578 | CCCGCGCGGTCCCGTCAGCG | 137 |
| 5579 | CCGCGCGGTCCCGTCAGCGC | 138 |
| 5580 | CGCGCGGTCCCGTCAGCGCC | 139 |
| 5581 | GCGCGGTCCCGTCAGCGCCG | 140 |
| 5582 | CGCGGTCCCGTCAGCGCCGA | 141 |
| 5583 | GCGGTCCCGTCAGCGCCGAG | 142 |
| 5584 | CGGTCCCGTCAGCGCCGAGG | 143 |
| 5585 | GGTCCCGTCAGCGCCGAGGG | 144 |
| 5586 | GTCCCGTCAGCGCCGAGGGG | 145 |
| 5587 | TCCCGTCAGCGCCGAGGGGC | 146 |
| 5588 | CCCGTCAGCGCCGAGGGGCC | 147 |
| 5589 | CCGTCAGCGCCGAGGGGCCG | 148 |
| 5590 | CGTCAGCGCCGAGGGGCCGG | 149 |
| 5591 | GTCAGCGCCGAGGGGCCGGT | 150 |
| 5592 | TCAGCGCCGAGGGGCCGGTA | 151 |
| 5593 | CAGCGCCGAGGGGCCGGTAG | 152 |
| 5594 | AGCGCCGAGGGGCCGGTAGC | 153 |
| 5595 | GCGCCGAGGGGCCGGTAGCG | 154 |
| 5596 | CGCCGAGGGGCCGGTAGCGG | 155 |
| 5597 | GCCGAGGGGCCGGTAGCGGT | 156 |
| 5598 | CCGAGGGGCCGGTAGCGGTC | 157 |
| 5599 | CGAGGGGCCGGTAGCGGTCT | 158 |
| 5600 | GAGGGGCCGGTAGCGGTCTC | 159 |
| 5601 | AGGGGCCGGTAGCGGTCTCA | 160 |
| 5602 | GGGGCCGGTAGCGGTCTCAG | 161 |
| 5603 | GGGCCGGTAGCGGTCTCAGT | 162 |
| 5604 | GGCCGGTAGCGGTCTCAGTG | 163 |
| 5605 | GCCGGTAGCGGTCTCAGTGG | 164 |
| 5606 | CCGGTAGCGGTCTCAGTGGA | 165 |
| 5607 | CGGTAGCGGTCTCAGTGGAC | 166 |
| 5608 | GGTAGCGGTCTCAGTGGACC | 167 |
| 5609 | GTAGCGGTCTCAGTGGACCC | 168 |
| 5610 | TAGCGGTCTCAGTGGACCCC | 169 |
| 5611 | AGCGGTCTCAGTGGACCCCC | 170 |
| 5612 | GCGGTCTCAGTGGACCCCCG | 171 |
| 5613 | CGGTCTCAGTGGACCCCCGC | 172 |
| 5614 | GGTCTCAGTGGACCCCCGCC | 173 |
| 5615 | GTCTCAGTGGACCCCCGCCC | 174 |
| 5616 | TCTCAGTGGACCCCCGCCCC | 175 |
| 5617 | CTCAGTGGACCCCCGCCCCA | 176 |
| 5618 | TCAGTGGACCCCCGCCCCAC | 177 |
| 5619 | CAGTGGACCCCCGCCCCACC | 178 |
| 5620 | AGTGGACCCCCGCCCCACCC | 179 |
| 5621 | GTGGACCCCCGCCCCACCCG | 180 |
| 5622 | TGGACCCCCGCCCCACCCGC | 181 |
| 5623 | GGACCCCCGCCCCACCCGCC | 182 |
| 5624 | GACCCCCGCCCCACCCGCCC | 183 |
| 5625 | ACCCCCGCCCCACCCGCCCG | 184 |
| 5626 | CCCCCGCCCCACCCGCCCGG | 185 |
| 5627 | CCCCGCCCCACCCGCCCGGG | 186 |
| 5628 | CCCGCCCCACCCGCCCGGGA | 187 |
| 5629 | CCGCCCCACCCGCCCGGGAC | 188 |
| 5630 | CGCCCCACCCGCCCGGGACT | 189 |
| 5631 | GCCCCACCCGCCCGGGACTC | 190 |
| 5632 | CCCCACCCGCCCGGGACTCG | 191 |
| 5633 | CCCACCCGCCCGGGACTCGG | 192 |
| 5634 | CCACCCGCCCGGGACTCGGC | 193 |
| 5635 | CACCCGCCCGGGACTCGGCT | 194 |
| 5636 | ACCCGCCCGGGACTCGGCTT | 195 |
| 5637 | CCCGCCCGGGACTCGGCTTC | 196 |
| 5638 | CCGCCCGGGACTCGGCTTCG | 197 |
| 5639 | CGCCCGGGACTCGGCTTCGC | 198 |
| 5640 | GCCCGGGACTCGGCTTCGCG | 199 |
| 5641 | CCCGGGACTCGGCTTCGCGC | 200 |
| 5642 | CCGGGACTCGGCTTCGCGCG | 201 |
| 5643 | CGGGACTCGGCTTCGCGCGC | 202 |
| 5644 | GGGACTCGGCTTCGCGCGCA | 203 |
| 5645 | GGACTCGGCTTCGCGCGCAG | 204 |
| 5646 | GACTCGGCTTCGCGCGCAGA | 205 |
| 5647 | ACTCGGCTTCGCGCGCAGAG | 206 |
| 5648 | CTCGGCTTCGCGCGCAGAGA | 207 |
| 5649 | TCGGCTTCGCGCGCAGAGAG | 208 |
| 5650 | CGGCTTCGCGCGCAGAGAGC | 209 |
| 5651 | GGCTTCGCGCGCAGAGAGCC | 210 |
| 5652 | GCTTCGCGCGCAGAGAGCCG | 211 |
| 5653 | CTTCGCGCGCAGAGAGCCGA | 212 |
| 5654 | TTCGCGCGCAGAGAGCCGAA | 213 |
| 5655 | TCGCGCGCAGAGAGCCGAAA | 214 |
| 5656 | CCAAGTCCGGGCCGCGGGCC | 92 |
| 5657 | ACCAAGTCCGGGCCGCGGGC | 91 |
| 5658 | GACCAAGTCCGGGCCGCGGG | 90 |
| 5659 | GGACCAAGTCCGGGCCGCGG | 89 |
| 5660 | AGGACCAAGTCCGGGCCGCG | 88 |
| 5661 | CAGGACCAAGTCCGGGCCGC | 87 |
| 5662 | GCAGGACCAAGTCCGGGCCG | 86 |
| 5663 | CGCAGGACCAAGTCCGGGCC | 85 |
| 5664 | GCGCAGGACCAAGTCCGGGC | 84 |
| 5665 | TGCGCAGGACCAAGTCCGGG | 83 |
| 5666 | CTGCGCAGGACCAAGTCCGG | 82 |
| 5667 | GCTGCGCAGGACCAAGTCCG | 81 |
| 5668 | CGCTGCGCAGGACCAAGTCC | 80 |
| 5669 | CCGCTGCGCAGGACCAAGTC | 79 |
| 5670 | CCCGCTGCGCAGGACCAAGT | 78 |
| 5671 | GCCCGCTGCGCAGGACCAAG | 77 |
| 5672 | CGCCCGCTGCGCAGGACCAA | 76 |
| 5673 | GCGCCCGCTGCGCAGGACCA | 75 |
| 5674 | CGCGCCCGCTGCGCAGGACC | 74 |
| 5675 | CCGCGCCCGCTGCGCAGGAC | 73 |
| 5676 | CCCGCGCCCGCTGCGCAGGA | 72 |
| 5677 | CCCCGCGCCCGCTGCGCAGG | 71 |
| 5678 | GCCCCGCGCCCGCTGCGCAG | 70 |
| 5679 | TGCCCCGCGCCCGCTGCGCA | 69 |
| 5680 | CTGCCCCGCGCCCGCTGCGC | 68 |
| 5681 | GCTGCCCCGCGCCCGCTGCG | 67 |
| 5682 | CGCTGCCCCGCGCCCGCTGC | 66 |
| 5683 | GCGCTGCCCCGCGCCCGCTG | 65 |
| 5684 | TGCGCTGCCCCGCGCCCGCT | 64 |
| 5685 | CTGCGCTGCCCCGCGCCCGC | 63 |
| 5686 | GCTGCGCTGCCCCGCGCCCG | 62 |
| 5687 | CGCTGCGCTGCCCCGCGCCC | 61 |
| 5688 | CCGCTGCGCTGCCCCGCGCC | 60 |
| 5689 | CCCGCTGCGCTGCCCCGCGC | 59 |
| 5690 | TCCCGCTGCGCTGCCCCGCG | 58 |
| 5691 | CTCCCGCTGCGCTGCCCCGC | 57 |
| 5692 | CCTCCCGCTGCGCTGCCCCG | 56 |
| 5693 | TCCTCCCGCTGCGCTGCCCC | 55 |
| 5694 | TTCCTCCCGCTGCGCTGCCC | 54 |
| 5695 | CTTCCTCCCGCTGCGCTGCC | 53 |
| 5696 | GCTTCCTCCCGCTGCGCTGC | 52 |
| 5697 | CGCTTCCTCCCGCTGCGCTG | 51 |
| 5698 | TCGCTTCCTCCCGCTGCGCT | 50 |
| 5699 | CTCGCTTCCTCCCGCTGCGC | 49 |
| 5700 | TCTCGCTTCCTCCCGCTGCG | 48 |
| 5701 | CTCTCGCTTCCTCCCGCTGC | 47 |
| 5702 | CCTCTCGCTTCCTCCCGCTG | 46 |
| 5703 | ACCTCTCGCTTCCTCCCGCT | 45 |
| 5704 | CACCTCTCGCTTCCTCCCGC | 44 |
| 5705 | GCACCTCTCGCTTCCTCCCG | 43 |
| 5706 | AGCACCTCTCGCTTCCTCCC | 42 |
| 5707 | CAGCACCTCTCGCTTCCTCC | 41 |
| 5708 | GCAGCACCTCTCGCTTCCTC | 40 |
| 5709 | GGCAGCACCTCTCGCTTCCT | 39 |
| 5710 | GGGCAGCACCTCTCGCTTCC | 38 |
| 5711 | AGGGCAGCACCTCTCGCTTC | 37 |
| 5712 | GAGGGCAGCACCTCTCGCTT | 36 |
| 5713 | GGAGGGCAGCACCTCTCGCT | 35 |
| 5714 | GGGAGGGCAGCACCTCTCGC | 34 |
| 5715 | GGGGAGGGCAGCACCTCTCG | 33 |
| 5716 | GCGCCCCGCGCGGTCCCGTCAGCGC | 133 |
| 5717 | CGCCCCGCGCGGTCCCGTCA | 134 |
| 5718 | GCCCCGCGCGGTCCCGTCAG | 135 |
| 5719 | CCCCGCGCGGTCCCGTCAGC | 136 |
| 5720 | CCCGCGCGGTCCCGTCAGCG | 137 |
| 5721 | CCGCGCGGTCCCGTCAGCGC | 138 |
| 5722 | CGCGCGGTCCCGTCAGCGCC | 139 |
| 5723 | GCGCGGTCCCGTCAGCGCCG | 140 |
| 5724 | CGCGGTCCCGTCAGCGCCGA | 141 |
| 5725 | GCGGTCCCGTCAGCGCCGAG | 142 |
| 5726 | CGGTCCCGTCAGCGCCGAGG | 143 |
| 5727 | GGTCCCGTCAGCGCCGAGGG | 144 |
| 5728 | GTCCCGTCAGCGCCGAGGGG | 145 |
| 5729 | TCCCGTCAGCGCCGAGGGGC | 146 |
| 5730 | CCCGTCAGCGCCGAGGGGCC | 147 |
| 5731 | CCGTCAGCGCCGAGGGGCCG | 148 |
| 5732 | CGTCAGCGCCGAGGGGCCGG | 149 |
| 5733 | GTCAGCGCCGAGGGGCCGGT | 150 |
| 5734 | TCAGCGCCGAGGGGCCGGTA | 151 |
| 5735 | CAGCGCCGAGGGGCCGGTAG | 152 |
| 5736 | AGCGCCGAGGGGCCGGTAGC | 153 |
| 5737 | GCGCCGAGGGGCCGGTAGCG | 154 |
| 5738 | CGCCGAGGGGCCGGTAGCGG | 155 |
| 5739 | GCCGAGGGGCCGGTAGCGGT | 156 |
| 5740 | CCGAGGGGCCGGTAGCGGTC | 157 |
| 5741 | CGAGGGGCCGGTAGCGGTCT | 158 |
| 5742 | GAGGGGCCGGTAGCGGTCTC | 159 |
| 5743 | AGGGGCCGGTAGCGGTCTCA | 160 |
| 5744 | GGGGCCGGTAGCGGTCTCAG | 161 |
| 5745 | GGGCCGGTAGCGGTCTCAGT | 162 |
| 5746 | GGCCGGTAGCGGTCTCAGTG | 163 |
| 5747 | GCCGGTAGCGGTCTCAGTGG | 164 |
| 5748 | CCGGTAGCGGTCTCAGTGGA | 165 |
| 5749 | CGGTAGCGGTCTCAGTGGAC | 166 |
| 5750 | GGTAGCGGTCTCAGTGGACC | 167 |
| 5751 | GTAGCGGTCTCAGTGGACCC | 168 |
| 5752 | TAGCGGTCTCAGTGGACCCC | 169 |
| 5753 | AGCGGTCTCAGTGGACCCCC | 170 |
| 5754 | GCGGTCTCAGTGGACCCCCG | 171 |
| 5755 | CGGTCTCAGTGGACCCCCGC | 172 |
| 5756 | GGTCTCAGTGGACCCCCGCC | 173 |
| 5757 | GTCTCAGTGGACCCCCGCCC | 174 |
| 5758 | TCTCAGTGGACCCCCGCCCC | 175 |
| 5759 | CTCAGTGGACCCCCGCCCCA | 176 |
| 5760 | TCAGTGGACCCCCGCCCCAC | 177 |
| 5761 | CAGTGGACCCCCGCCCCACC | 178 |
| 5762 | AGTGGACCCCCGCCCCACCC | 179 |
| 5763 | GTGGACCCCCGCCCCACCCG | 180 |
| 5764 | TGGACCCCCGCCCCACCCGC | 181 |
| 5765 | GGACCCCCGCCCCACCCGCC | 182 |
| 5766 | GACCCCCGCCCCACCCGCCC | 183 |
| 5767 | ACCCCCGCCCCACCCGCCCG | 184 |
| 5768 | CCCCCGCCCCACCCGCCCGG | 185 |
| 5769 | CCCCGCCCCACCCGCCCGGG | 186 |
| 5770 | CCCGCCCCACCCGCCCGGGA | 187 |
| 5771 | CCGCCCCACCCGCCCGGGAC | 188 |
| 5772 | CGCCCCACCCGCCCGGGACT | 189 |
| 5773 | GCCCCACCCGCCCGGGACTC | 190 |
| 5774 | CCCCACCCGCCCGGGACTCG | 191 |
| 5775 | CCCACCCGCCCGGGACTCGG | 192 |
| 5776 | CCACCCGCCCGGGACTCGGC | 193 |
| 5777 | CACCCGCCCGGGACTCGGCT | 194 |
| 5778 | ACCCGCCCGGGACTCGGCTT | 195 |
| 5779 | CCCGCCCGGGACTCGGCTTC | 196 |
| 5780 | CCGCCCGGGACTCGGCTTCG | 197 |
| 5781 | CGCCCGGGACTCGGCTTCGC | 198 |
| 5782 | GCCCGGGACTCGGCTTCGCG | 199 |
| 5783 | CCCGGGACTCGGCTTCGCGC | 200 |
| 5784 | CCGGGACTCGGCTTCGCGCG | 201 |
| 5785 | CGGGACTCGGCTTCGCGCGC | 202 |
| 5786 | GGGACTCGGCTTCGCGCGCA | 203 |
| 5787 | GGACTCGGCTTCGCGCGCAG | 204 |
| 5788 | GACTCGGCTTCGCGCGCAGA | 205 |
| 5789 | ACTCGGCTTCGCGCGCAGAG | 206 |
| 5790 | CTCGGCTTCGCGCGCAGAGA | 207 |
| 5791 | TCGGCTTCGCGCGCAGAGAG | 208 |
| 5792 | CGGCTTCGCGCGCAGAGAGC | 209 |
| 5793 | GGCTTCGCGCGCAGAGAGCC | 210 |
| 5794 | GCTTCGCGCGCAGAGAGCCG | 211 |
| 5795 | CTTCGCGCGCAGAGAGCCGA | 212 |
| 5796 | TTCGCGCGCAGAGAGCCGAA | 213 |
| 5797 | TCGCGCGCAGAGAGCCGAAA | 214 |
| 5798 | TGCGCCCCGCGCGGTCCCGT | 132 |
| 5799 | GTGCGCCCCGCGCGGTCCCG | 131 |
| 5800 | GGTGCGCCCCGCGCGGTCCC | 130 |
| 5801 | GGGTGCGCCCCGCGCGGTCC | 129 |
| 5802 | CGGGTGCGCCCCGCGCGGTC | 128 |
| 5803 | GCGGGTGCGCCCCGCGCGGT | 127 |
| 5804 | AGCGGGTGCGCCCCGCGCGG | 126 |
| 5805 | CAGCGGGTGCGCCCCGCGCG | 125 |
| 5806 | TCAGCGGGTGCGCCCCGCGC | 124 |
| 5807 | TTCAGCGGGTGCGCCCCGCG | 123 |
| 5808 | CTTCAGCGGGTGCGCCCCGC | 122 |
| 5809 | CCTTCAGCGGGTGCGCCCCG | 121 |
| 5810 | GCCTTCAGCGGGTGCGCCCC | 120 |
| 5811 | TGCCTTCAGCGGGTGCGCCC | 119 |
| 5812 | CTGCCTTCAGCGGGTGCGCC | 118 |
| 5813 | GCTGCCTTCAGCGGGTGCGC | 117 |
| 5814 | GGCTGCCTTCAGCGGGTGCG | 116 |
| 5815 | GGGCTGCCTTCAGCGGGTGC | 115 |
| 5816 | GGGGCTGCCTTCAGCGGGTG | 114 |
| 5817 | CGGGGCTGCCTTCAGCGGGT | 113 |
| 5818 | CCGGGGCTGCCTTCAGCGGG | 112 |
| 5819 | CCCGGGGCTGCCTTCAGCGG | 111 |
| 5820 | CCCCGGGGCTGCCTTCAGCG | 110 |
| 5821 | GCCCCGGGGCTGCCTTCAGC | 109 |
| 5822 | GGCCCCGGGGCTGCCTTCAG | 108 |
| 5823 | GGGCCCCGGGGCTGCCTTCA | 107 |
| 5824 | CGGGCCCCGGGGCTGCCTTC | 106 |
| 5825 | GCGGGCCCCGGGGCTGCCTT | 105 |
| 5826 | CGCGGGCCCCGGGGCTGCCT | 104 |
| 5827 | CCGCGGGCCCCGGGGCTGCC | 103 |
| 5828 | GCCGCGGGCCCCGGGGCTGC | 102 |
| 5829 | GGCCGCGGGCCCCGGGGCTG | 101 |
| 5830 | GGGCCGCGGGCCCCGGGGCT | 100 |
| 5831 | CGGGCCGCGGGCCCCGGGGC | 99 |
| 5832 | CCGGGCCGCGGGCCCCGGGG | 98 |
| 5833 | TCCGGGCCGCGGGCCCCGGG | 97 |
| 5834 | GTCCGGGCCGCGGGCCCCGG | 96 |
| 5835 | AGTCCGGGCCGCGGGCCCCG | 95 |
| 5836 | AAGTCCGGGCCGCGGGCCCC | 94 |
| 5837 | CAAGTCCGGGCCGCGGGCCC | 93 |
| 5838 | CCAAGTCCGGGCCGCGGGCC | 92 |
| 5839 | ACCAAGTCCGGGCCGCGGGC | 91 |
| 5840 | GACCAAGTCCGGGCCGCGGG | 90 |
| 5841 | GGACCAAGTCCGGGCCGCGG | 89 |
| 5842 | AGGACCAAGTCCGGGCCGCG | 88 |
| 5843 | CAGGACCAAGTCCGGGCCGC | 87 |
| 5844 | GCAGGACCAAGTCCGGGCCG | 86 |
| 5845 | CGCAGGACCAAGTCCGGGCC | 85 |
| 5846 | GCGCAGGACCAAGTCCGGGC | 84 |
| 5847 | TGCGCAGGACCAAGTCCGGG | 83 |
| 5848 | CTGCGCAGGACCAAGTCCGG | 82 |
| 5849 | GCTGCGCAGGACCAAGTCCG | 81 |
| 5850 | CGCTGCGCAGGACCAAGTCC | 80 |
| 5851 | CCGCTGCGCAGGACCAAGTC | 79 |
| 5852 | CCCGCTGCGCAGGACCAAGT | 78 |
| 5853 | GCCCGCTGCGCAGGACCAAG | 77 |
| 5854 | CGCCCGCTGCGCAGGACCAA | 76 |
| 5855 | GCGCCCGCTGCGCAGGACCA | 75 |
| 5856 | CGCGCCCGCTGCGCAGGACC | 74 |
| 5857 | CCGCGCCCGCTGCGCAGGAC | 73 |
| 5858 | CCCGCGCCCGCTGCGCAGGA | 72 |
| 5859 | CCCCGCGCCCGCTGCGCAGG | 71 |
| 5860 | GCCCCGCGCCCGCTGCGCAG | 70 |
| 5861 | TGCCCCGCGCCCGCTGCGCA | 69 |
| 5862 | CTGCCCCGCGCCCGCTGCGC | 68 |
| 5863 | GCTGCCCCGCGCCCGCTGCG | 67 |
| 5864 | CGCTGCCCCGCGCCCGCTGC | 66 |
| 5865 | GCGCTGCCCCGCGCCCGCTG | 65 |
| 5866 | TGCGCTGCCCCGCGCCCGCT | 64 |
| 5867 | CTGCGCTGCCCCGCGCCCGC | 63 |
| 5868 | GCTGCGCTGCCCCGCGCCCG | 62 |
| 5869 | CGCTGCGCTGCCCCGCGCCC | 61 |
| 5870 | CCGCTGCGCTGCCCCGCGCC | 60 |
| 5871 | CCCGCTGCGCTGCCCCGCGC | 59 |
| 5872 | TCCCGCTGCGCTGCCCCGCG | 58 |
| 5873 | CTCCCGCTGCGCTGCCCCGC | 57 |
| 5874 | CCTCCCGCTGCGCTGCCCCG | 56 |
| 5875 | TCCTCCCGCTGCGCTGCCCC | 55 |
| 5876 | TTCCTCCCGCTGCGCTGCCC | 54 |
| 5877 | CTTCCTCCCGCTGCGCTGCC | 53 |
| 5878 | GCTTCCTCCCGCTGCGCTGC | 52 |
| 5879 | CGCTTCCTCCCGCTGCGCTG | 51 |
| 5880 | TCGCTTCCTCCCGCTGCGCT | 50 |
| 5881 | CTCGCTTCCTCCCGCTGCGC | 49 |
| 5882 | TCTCGCTTCCTCCCGCTGCG | 48 |
| 5883 | CTCTCGCTTCCTCCCGCTGC | 47 |
| 5884 | CCTCTCGCTTCCTCCCGCTG | 46 |
| 5885 | ACCTCTCGCTTCCTCCCGCT | 45 |
| 5886 | CACCTCTCGCTTCCTCCCGC | 44 |
| 5887 | GCACCTCTCGCTTCCTCCCG | 43 |
| 5888 | AGCACCTCTCGCTTCCTCCC | 42 |
| 5889 | CAGCACCTCTCGCTTCCTCC | 41 |
| 5890 | GCAGCACCTCTCGCTTCCTC | 40 |
| 5891 | GGCAGCACCTCTCGCTTCCT | 39 |
| 5892 | GGGCAGCACCTCTCGCTTCC | 38 |
| 5893 | AGGGCAGCACCTCTCGCTTC | 37 |
| 5894 | GAGGGCAGCACCTCTCGCTT | 36 |
| 5895 | GGAGGGCAGCACCTCTCGCT | 35 |
| 5896 | GGGAGGGCAGCACCTCTCGC | 34 |
| 5897 | GGGGAGGGCAGCACCTCTCG | 33 |
| 5898 | GCGGAGCGGGCTGAACGTGCG | 249 |
| 5899 | CGGAGCGGGCTGAACGTGCG | 250 |
| 5900 | GACTGGAGGCCGGGGGAGGGGCGGGG | 433 |
| 5901 | GACCCGGGTAACGCGCTTCCAAC | 5 |
| 5902 | ACCCGGGTAACGCGCTTCCA | 6 |
| 5903 | CCCGGGTAACGCGCTTCCAA | 7 |
| 5904 | CCGGGTAACGCGCTTCCAAC | 8 |
| 5905 | CGGGTAACGCGCTTCCAACT | 9 |
| 5906 | GGGTAACGCGCTTCCAACTC | 10 |
| 5907 | GGTAACGCGCTTCCAACTCC | 11 |
| 5908 | GTAACGCGCTTCCAACTCCG | 12 |
| 5909 | TAACGCGCTTCCAACTCCGG | 13 |
| 5910 | AACGCGCTTCCAACTCCGGG | 14 |
| 5911 | ACGCGCTTCCAACTCCGGGG | 15 |
| 5912 | CGCGCTTCCAACTCCGGGGG | 16 |
| 5913 | GCGCTTCCAACTCCGGGGGG | 17 |
| 5914 | CGCTTCCAACTCCGGGGGGA | 18 |
| 5915 | GCTTCCAACTCCGGGGGGAG | 19 |
| 5916 | CTTCCAACTCCGGGGGGAGG | 20 |
| 5917 | TTCCAACTCCGGGGGGAGGG | 21 |
| 5918 | TCCAACTCCGGGGGGAGGGC | 22 |
| 5919 | CCAACTCCGGGGGGAGGGCA | 23 |
| 5920 | GGACCCGGGTAACGCGCTTC | 4 |
| 5921 | TGGACCCGGGTAACGCGCTT | 3 |
| 5922 | TTGGACCCGGGTAACGCGCT | 2 |
| 5923 | TTTGGACCCGGGTAACGCGC | 1 |
| 5924 | CACTCGGCTCCGCCCCTATTGC | 507 |
| 5925 | ACTCGGCTCCGCCCCTATTG | 508 |
| 5926 | CTCGGCTCCGCCCCTATTGC | 509 |
| 5927 | TCGGCTCCGCCCCTATTGCC | 510 |
| 5928 | CGGCTCCGCCCCTATTGCCT | 511 |
| 5929 | GGCTCCGCCCCTATTGCCTC | 512 |
| 5930 | GCTCCGCCCCTATTGCCTCG | 513 |
| 5931 | CTCCGCCCCTATTGCCTCGC | 514 |
| 5932 | TCCGCCCCTATTGCCTCGCA | 515 |
| 5933 | CCGCCCCTATTGCCTCGCAG | 516 |
| 5934 | CGCCCCTATTGCCTCGCAGA | 517 |
| 5935 | GCCCCTATTGCCTCGCAGAC | 518 |
| 5936 | CCCCTATTGCCTCGCAGACA | 519 |
| 5937 | CCCTATTGCCTCGCAGACAA | 520 |
| 5938 | CCTATTGCCTCGCAGACAAC | 521 |
| 5939 | CTATTGCCTCGCAGACAACC | 522 |
| 5940 | TATTGCCTCGCAGACAACCA | 523 |
| 5941 | ATTGCCTCGCAGACAACCAA | 524 |
| 5942 | TTGCCTCGCAGACAACCAAT | 525 |
| 5943 | TGCCTCGCAGACAACCAATG | 526 |
| 5944 | GCCTCGCAGACAACCAATGG | 527 |
| 5945 | CCTCGCAGACAACCAATGGG | 528 |
| 5946 | CTCGCAGACAACCAATGGGG | 529 |
| 5947 | TCGCAGACAACCAATGGGGG | 530 |
| 5948 | CGCAGACAACCAATGGGGGC | 531 |
| 5949 | CCACTCGGCTCCGCCCCTAT | 506 |
| 5950 | CCCACTCGGCTCCGCCCCTA | 505 |
| 5951 | TCCCACTCGGCTCCGCCCCT | 504 |
| 5952 | CTCCCACTCGGCTCCGCCCC | 503 |
| 5953 | ACTCCCACTCGGCTCCGCCC | 502 |
| 5954 | CACTCCCACTCGGCTCCGCC | 501 |
| 5955 | ACACTCCCACTCGGCTCCGC | 500 |
| 5956 | CACACTCCCACTCGGCTCCG | 499 |
| 5957 | CCACACTCCCACTCGGCTCC | 498 |
| 5958 | TCCACACTCCCACTCGGCTC | 497 |
| 5959 | TTCCACACTCCCACTCGGCT | 496 |
| 5960 | TTTCCACACTCCCACTCGGC | 495 |
| 5961 | CTTTCCACACTCCCACTCGG | 494 |
| 5962 | GCTTTCCACACTCCCACTCG | 493 |
| 5963 | CGCTTTCCACACTCCCACTC | 492 |
| 5964 | GCGCTTTCCACACTCCCACT | 491 |
| 5965 | GGCGCTTTCCACACTCCCAC | 490 |
| 5966 | CGGCGCTTTCCACACTCCCA | 489 |
| 5967 | GCGGCGCTTTCCACACTCCC | 488 |
| 5968 | TGCGGCGCTTTCCACACTCC | 487 |
| 5969 | ATGCGGCGCTTTCCACACTC | 486 |
| 5970 | GATGCGGCGCTTTCCACACT | 485 |
| 5971 | GGATGCGGCGCTTTCCACAC | 484 |
| 5972 | GGGATGCGGCGCTTTCCACA | 483 |
| 5973 | CGGGATGCGGCGCTTTCCAC | 482 |
| 5974 | CCGGGATGCGGCGCTTTCCA | 481 |
| 5975 | CCCGGGATGCGGCGCTTTCC | 480 |
| 5976 | ACCCGGGATGCGGCGCTTTC | 479 |
| 5977 | CACCCGGGATGCGGCGCTTT | 478 |
| 5978 | CCACCCGGGATGCGGCGCTT | 477 |
| 5979 | CCCACCCGGGATGCGGCGCT | 476 |
| 5980 | TCCCACCCGGGATGCGGCGC | 475 |
| 5981 | CTCCCACCCGGGATGCGGCG | 474 |
| 5982 | CCTCCCACCCGGGATGCGGC | 473 |
| 5983 | GCCTCCCACCCGGGATGCGG | 472 |
| 5984 | CGCCTCCCACCCGGGATGCG | 471 |
| 5985 | TCGCCTCCCACCCGGGATGC | 470 |
| 5986 | CTCGCCTCCCACCCGGGATG | 469 |
| 5987 | CCTCGCCTCCCACCCGGGAT | 468 |
| 5988 | GCCTCGCCTCCCACCCGGGA | 467 |
| 5989 | AGCCTCGCCTCCCACCCGGG | 466 |
| 5990 | AAGCCTCGCCTCCCACCCGG | 465 |
| 5991 | GAAGCCTCGCCTCCCACCCG | 464 |
| 5992 | GGAAGCCTCGCCTCCCACCC | 463 |
| 5993 | GGGAAGCCTCGCCTCCCACC | 462 |
| 5994 | GGGGAAGCCTCGCCTCCCAC | 461 |
| 5995 | AGGGGAAGCCTCGCCTCCCA | 460 |
| 5996 | AAGGGGAAGCCTCGCCTCCC | 459 |
| 5997 | GAAGGGGAAGCCTCGCCTCC | 458 |
| 5998 | GGAAGGGGAAGCCTCGCCTC | 457 |
| 5999 | GGGAAGGGGAAGCCTCGCCT | 456 |
| 6000 | TACGTCACGGGAGCGCGGCGCAC | 578 |
| 6001 | ACGTCACGGGAGCGCGGCGC | 579 |
| 6002 | CGTCACGGGAGCGCGGCGCA | 580 |
| 6003 | GTCACGGGAGCGCGGCGCAC | 581 |
| 6004 | TCACGGGAGCGCGGCGCACT | 582 |
| 6005 | CACGGGAGCGCGGCGCACTG | 583 |
| 6006 | ACGGGAGCGCGGCGCACTGC | 584 |
| 6007 | CGGGAGCGCGGCGCACTGCC | 585 |
| 6008 | GGGAGCGCGGCGCACTGCCT | 586 |
| 6009 | GGAGCGCGGCGCACTGCCTG | 587 |
| 6010 | GAGCGCGGCGCACTGCCTGG | 588 |
| 6011 | AGCGCGGCGCACTGCCTGGG | 589 |
| 6012 | GCGCGGCGCACTGCCTGGGG | 590 |
| 6013 | CGCGGCGCACTGCCTGGGGG | 591 |
| 6014 | GCGGCGCACTGCCTGGGGGC | 592 |
| 6015 | CGGCGCACTGCCTGGGGGCG | 593 |
| 6016 | GGCGCACTGCCTGGGGGCGG | 594 |
| 6017 | GCGCACTGCCTGGGGGCGGG | 595 |
| 6018 | CGCACTGCCTGGGGGCGGGG | 596 |
| 6019 | GCACTGCCTGGGGGCGGGGT | 597 |
| 6020 | CACTGCCTGGGGGCGGGGTC | 598 |
| 6021 | ACTGCCTGGGGGCGGGGTCC | 599 |
| 6022 | CTGCCTGGGGGCGGGGTCCG | 600 |
| 6023 | TGCCTGGGGGCGGGGTCCGT | 601 |
| 6024 | GCCTGGGGGCGGGGTCCGTC | 602 |
| 6025 | CCTGGGGGCGGGGTCCGTCG | 603 |
| 6026 | CTGGGGGCGGGGTCCGTCGC | 604 |
| 6027 | TGGGGGCGGGGTCCGTCGCG | 605 |
| 6028 | GGGGGCGGGGTCCGTCGCGG | 606 |
| 6029 | GGGGCGGGGTCCGTCGCGGA | 607 |
| 6030 | GGGCGGGGTCCGTCGCGGAC | 608 |
| 6031 | GGCGGGGTCCGTCGCGGACG | 609 |
| 6032 | GCGGGGTCCGTCGCGGACGC | 610 |
| 6033 | CGGGGTCCGTCGCGGACGCC | 611 |
| 6034 | GGGGTCCGTCGCGGACGCCG | 612 |
| 6035 | GGGTCCGTCGCGGACGCCGT | 613 |
| 6036 | GGTCCGTCGCGGACGCCGTG | 614 |
| 6037 | GTCCGTCGCGGACGCCGTGG | 615 |
| 6038 | TCCGTCGCGGACGCCGTGGC | 616 |
| 6039 | CCGTCGCGGACGCCGTGGCG | 617 |
| 6040 | CGTCGCGGACGCCGTGGCGC | 618 |
| 6041 | GTCGCGGACGCCGTGGCGCC | 619 |
| 6042 | TCGCGGACGCCGTGGCGCCC | 620 |
| 6043 | CGCGGACGCCGTGGCGCCCT | 621 |
| 6044 | GCGGACGCCGTGGCGCCCTC | 622 |
| 6045 | CGGACGCCGTGGCGCCCTCT | 623 |
| 6046 | GGACGCCGTGGCGCCCTCTG | 624 |
| 6047 | GACGCCGTGGCGCCCTCTGT | 625 |
| 6048 | ACGCCGTGGCGCCCTCTGTC | 626 |
| 6049 | CGCCGTGGCGCCCTCTGTCG | 627 |
| 6050 | GCCGTGGCGCCCTCTGTCGC | 628 |
| 6051 | CCGTGGCGCCCTCTGTCGCC | 629 |
| 6052 | CGTGGCGCCCTCTGTCGCCC | 630 |
| 6053 | GTGGCGCCCTCTGTCGCCCC | 631 |
| 6054 | TGGCGCCCTCTGTCGCCCCG | 632 |
| 6055 | GGCGCCCTCTGTCGCCCCGA | 633 |
| 6056 | GCGCCCTCTGTCGCCCCGAG | 634 |
| 6057 | CGCCCTCTGTCGCCCCGAGG | 635 |
| 6058 | GCCCTCTGTCGCCCCGAGGC | 636 |
| 6059 | CCCTCTGTCGCCCCGAGGCA | 637 |
| 6060 | CCTCTGTCGCCCCGAGGCAA | 638 |
| 6061 | CTCTGTCGCCCCGAGGCAAG | 639 |
| 6062 | TCTGTCGCCCCGAGGCAAGC | 640 |
| 6063 | CTGTCGCCCCGAGGCAAGCA | 641 |
| 6064 | TGTCGCCCCGAGGCAAGCAG | 642 |
| 6065 | GTCGCCCCGAGGCAAGCAGG | 643 |
| 6066 | TCGCCCCGAGGCAAGCAGGT | 644 |
| 6067 | CGCCCCGAGGCAAGCAGGTG | 645 |
| 6068 | GCCCCGAGGCAAGCAGGTGG | 646 |
| 6069 | CCCCGAGGCAAGCAGGTGGA | 647 |
| 6070 | CCCGAGGCAAGCAGGTGGAC | 648 |
| 6071 | CCGAGGCAAGCAGGTGGACC | 649 |
| 6072 | CGAGGCAAGCAGGTGGACCC | 650 |
| 6073 | ATACGTCACGGGAGCGCGGC | 577 |
| 6074 | AATACGTCACGGGAGCGCGG | 576 |
| 6075 | AAATACGTCACGGGAGCGCG | 575 |
| 6076 | GAAATACGTCACGGGAGCGC | 574 |
| 6077 | GTCGCGGACGCCGTGGCGCCCTCTGTC | 619 |
| 6078 | TCGCGGACGCCGTGGCGCCC | 620 |
| 6079 | CGCGGACGCCGTGGCGCCCT | 621 |
| 6080 | GCGGACGCCGTGGCGCCCTC | 622 |
| 6081 | CGGACGCCGTGGCGCCCTCT | 623 |
| 6082 | GGACGCCGTGGCGCCCTCTG | 624 |
| 6083 | GACGCCGTGGCGCCCTCTGT | 625 |
| 6084 | ACGCCGTGGCGCCCTCTGTC | 626 |
| 6085 | CGCCGTGGCGCCCTCTGTCG | 627 |
| 6086 | GCCGTGGCGCCCTCTGTCGC | 628 |
| 6087 | CCGTGGCGCCCTCTGTCGCC | 629 |
| 6088 | CGTGGCGCCCTCTGTCGCCC | 630 |
| 6089 | GTGGCGCCCTCTGTCGCCCC | 631 |
| 6090 | TGGCGCCCTCTGTCGCCCCG | 632 |
| 6091 | GGCGCCCTCTGTCGCCCCGA | 633 |
| 6092 | GCGCCCTCTGTCGCCCCGAG | 634 |
| 6093 | CGCCCTCTGTCGCCCCGAGG | 635 |
| 6094 | GCCCTCTGTCGCCCCGAGGC | 636 |
| 6095 | CCCTCTGTCGCCCCGAGGCA | 637 |
| 6096 | CCTCTGTCGCCCCGAGGCAA | 638 |
| 6097 | CTCTGTCGCCCCGAGGCAAG | 639 |
| 6098 | TCTGTCGCCCCGAGGCAAGC | 640 |
| 6099 | CTGTCGCCCCGAGGCAAGCA | 641 |
| 6100 | TGTCGCCCCGAGGCAAGCAG | 642 |
| 6101 | GTCGCCCCGAGGCAAGCAGG | 643 |
| 6102 | TCGCCCCGAGGCAAGCAGGT | 644 |
| 6103 | CGCCCCGAGGCAAGCAGGTG | 645 |
| 6104 | GCCCCGAGGCAAGCAGGTGG | 646 |
| 6105 | CCCCGAGGCAAGCAGGTGGA | 647 |
| 6106 | CCCGAGGCAAGCAGGTGGAC | 648 |
| 6107 | CCGAGGCAAGCAGGTGGACC | 649 |
| 6108 | CGAGGCAAGCAGGTGGACCC | 650 |
| 6109 | CGTCGCGGACGCCGTGGCGC | 618 |
| 6110 | CCGTCGCGGACGCCGTGGCG | 617 |
| 6111 | TCCGTCGCGGACGCCGTGGC | 616 |
| 6112 | GTCCGTCGCGGACGCCGTGG | 615 |
| 6113 | GGTCCGTCGCGGACGCCGTG | 614 |
| 6114 | GGGTCCGTCGCGGACGCCGT | 613 |
| 6115 | GGGGTCCGTCGCGGACGCCG | 612 |
| 6116 | CGGGGTCCGTCGCGGACGCC | 611 |
| 6117 | GCGGGGTCCGTCGCGGACGC | 610 |
| 6118 | GGCGGGGTCCGTCGCGGACG | 609 |
| 6119 | GGGCGGGGTCCGTCGCGGAC | 608 |
| 6120 | GGGGCGGGGTCCGTCGCGGA | 607 |
| 6121 | GGGGGCGGGGTCCGTCGCGG | 606 |
| 6122 | TGGGGGCGGGGTCCGTCGCG | 605 |
| 6123 | CTGGGGGCGGGGTCCGTCGC | 604 |
| 6124 | CCTGGGGGCGGGGTCCGTCG | 603 |
| 6125 | GCCTGGGGGCGGGGTCCGTC | 602 |
| 6126 | TGCCTGGGGGCGGGGTCCGT | 601 |
| 6127 | CTGCCTGGGGGCGGGGTCCG | 600 |
| 6128 | ACTGCCTGGGGGCGGGGTCC | 599 |
| 6129 | CACTGCCTGGGGGCGGGGTC | 598 |
| 6130 | GCACTGCCTGGGGGCGGGGT | 597 |
| 6131 | CGCACTGCCTGGGGGCGGGG | 596 |
| 6132 | GCGCACTGCCTGGGGGCGGG | 595 |
| 6133 | GGCGCACTGCCTGGGGGCGG | 594 |
| 6134 | CGGCGCACTGCCTGGGGGCG | 593 |
| 6135 | GCGGCGCACTGCCTGGGGGC | 592 |
| 6136 | CGCGGCGCACTGCCTGGGGG | 591 |
| 6137 | GCGCGGCGCACTGCCTGGGG | 590 |
| 6138 | AGCGCGGCGCACTGCCTGGG | 589 |
| 6139 | GAGCGCGGCGCACTGCCTGG | 588 |
| 6140 | GGAGCGCGGCGCACTGCCTG | 587 |
| 6141 | GGGAGCGCGGCGCACTGCCT | 586 |
| 6142 | CGGGAGCGCGGCGCACTGCC | 585 |
| 6143 | ACGGGAGCGCGGCGCACTGC | 584 |
| 6144 | CACGGGAGCGCGGCGCACTG | 583 |
| 6145 | TCACGGGAGCGCGGCGCACT | 582 |
| 6146 | GTCACGGGAGCGCGGCGCAC | 581 |
| 6147 | CGTCACGGGAGCGCGGCGCA | 580 |
| 6148 | ACGTCACGGGAGCGCGGCGC | 579 |
| 6149 | TACGTCACGGGAGCGCGGCG | 578 |
| 6150 | ATACGTCACGGGAGCGCGGC | 577 |
| 6151 | AATACGTCACGGGAGCGCGG | 576 |
| 6152 | AAATACGTCACGGGAGCGCG | 575 |
| 6153 | GAAATACGTCACGGGAGCGC | 574 |
| 6154 | CACTCGCCGTCATGCCCGGATCC | 1183 |
| 6155 | ACTCGCCGTCATGCCCGGAT | 1184 |
| 6156 | CTCGCCGTCATGCCCGGATC | 1185 |
| 6157 | TCGCCGTCATGCCCGGATCC | 1186 |
| 6158 | CGCCGTCATGCCCGGATCCT | 1187 |
| 6159 | GCCGTCATGCCCGGATCCTT | 1188 |
| 6160 | CCGTCATGCCCGGATCCTTT | 1189 |
| 6161 | CGTCATGCCCGGATCCTTTT | 1190 |
| 6162 | GTCATGCCCGGATCCTTTTT | 1191 |
| 6163 | TCATGCCCGGATCCTTTTTG | 1192 |
| 6164 | CATGCCCGGATCCTTTTTGT | 1193 |
| 6165 | ATGCCCGGATCCTTTTTGTA | 1194 |
| 6166 | TGCCCGGATCCTTTTTGTAT | 1195 |
| 6167 | GCCCGGATCCTTTTTGTATT | 1196 |
| 6168 | GCACTCGCCGTCATGCCCGG | 1182 |
| 6169 | GGCACTCGCCGTCATGCCCG | 1181 |
| 6170 | AGGCACTCGCCGTCATGCCC | 1180 |
| 6171 | CAGGCACTCGCCGTCATGCC | 1179 |
| 6172 | ACAGGCACTCGCCGTCATGC | 1178 |
| 6173 | TACAGGCACTCGCCGTCATG | 1177 |
| 6174 | TTACAGGCACTCGCCGTCAT | 1176 |
| 6175 | ATTACAGGCACTCGCCGTCA | 1175 |
| 6176 | GATTACAGGCACTCGCCGTC | 1174 |
| 6177 | GGATTACAGGCACTCGCCGT | 1173 |
| 6178 | GGGATTACAGGCACTCGCCG | 1172 |
| 6179 | TGGGATTACAGGCACTCGCC | 1171 |
| 6180 | CTGGGATTACAGGCACTCGC | 1170 |
| 6181 | GCTGGGATTACAGGCACTCG | 1169 |

Hot Zones (Relative upstream location to gene start site)
1-950
1050-1500

### Examples

[0380] In FIG. 37, In HCT-116 (human colorectal carcinoma), MEK1_{—}1 (216) and MEK1_{—}2 (212) produced statistically significant (P<0.05) inhibition at 10 μM compared to the untreated and negative control values. The MEK1 sequences MEK1_{—}1 (216) and MEK1_{—}2 (212) fit the independent and dependent DNAi motif claims.

[0381] The secondary structures for MEK1_{—}1 (216) and MEK1_{—}2 (212) are shown in FIGS. 38 and 39.

Genetic Code (5′ Upstream Region)

(SEQ ID NO: 11969)

ACATATAGTTCAGTCTTATTCTTGTCTGTATGGTCAGCACTTATGTTAGG
CCCTCAGGAAAAGTTGACAGAACCGATGGATCACTGCCGGTCTGAAAAGG
AAATGAGGAAAACAAATTCTCCTACCTTGAACTATTCTGCAAACTTTAAC
CATTGGGGTAATTGTTTATCTGGGCTTCTTGGATCATGATAAGGGCTTAG
GGTTTACTCAGTGGAGGCCAACCCAGCATGCATAGAATCATAATATTTCA
ATATTAAAAAGAATGCTGCATTTTACACAGAGTGGAAGTGAGGCCTTGAA
AATTTCAATTAATTGCTCAAAGTCCTAATAGTTTTTATTTGAACTAGTAA
ATATAAAATTATACCAGAATTCAGATAGACTGCCTTGATAATAGATTACT
TTGAAAAGTTTCAATTTTTTTTTTTTTTTTGAGATAGTCTCACTGTGTTG
CACAGGCTGGAGTACAGTGGAGTGATCTTGGCTCACTGTAACCTCCACCT
CCTGGGTTCAAGTGATTCTCCAGCTTCAGCCTCCCAAGTAGCTGGGACTA
CAGGCACCCGCCACCACATTCAGATAATTTTTGTATTTTTAGTAAAGACA
GGGTTTCACCATGTTGGCCAGGCTTGGTCTTGAACTCCTGACCTCAGGTG
ATCCTCCCACCTCAGCCTCCCAAAGTGCTGGGATTAAAGGTGTGAGCCAC
CACCACACCTGGCCTTCAATTCACTTTTTAATGTTTATTATTTTACTCTG
ATACTAAAAATTATGCATGTTTAACATGAATAAGGACACACTTCTACACA
CACATGCATACATTTACATCTATGCCTCTATATTAAAAAGTATGGGGGAA
AGAAATGGGGAGATGTAGGTCAAAGAATATAAAGCAGCAGATATGTAGGA
TGAAGAAGTCTAGAGATCTAATGTACAACATGAAGACCATAGTTAATAAC
ATTGTATTTTATTTGCGTTTTTTGTTAAATAAGTAGATTTTAGCTGCTCG
TCATACTTTACACAAGCCTTTATGTGACGGTATAGATATGTTAATTCACT
TCACTATAGTAACCATTTTACTATCTATATATATCCCATAACATCATGTT
ACAAACCTCAAATATACACAATAAAATTTATTTTTATTTATTTAATTTAT
TTATTTATTTTTGAGACGGAGTCTTGTTCTGTCGCCCAGGCTGGAGTGCA
GTGGCGCGATCTCGGCTCACTGCAAGCTCCACCTCCCGGGTTCACACCAT
TCTCCTGCCTCAGCCTCCTGAGTAGCTGGGACTACAGGCACCCACCACCA
CGCCCGGCTAATTTTTTGTATTTTTTAGTAGAGATGGGGTTTCACCGTGT
TAGCCAGGATGGTCTCGATTTCCTGACCTCGTGATCTGCCCACCTCAGCC
TCCCAAAGTGCTGGGATTACAGGCATGAGCCACCGCGCCCGGCCTATTTT
ATTTATTTTTGAGACAGAGTCTTGCTCTGTTGCCCAGGCTGGAGTGCAGT
GGTGCAATCTCGGCTCACTGCAAACTCTGCCTCCCTGGTTCAGGCAATTA
TCCTGCCTCAGCCTCCTGAGTAGCTGGGATTACAGGTGCCCACCACCATG
CCTGGCTAATTTTTGTAATTTAGTAGAGACGGGGTTTCACCATGTTGGCC
AGGCTGATCTTGAAGTCCTGACCTCAAGTGATCTTCCAGCTTTGGCCTCA
CAAAGTGCTGGGATTACAGGTGGTAGCCGCCACTGCATCCACCCAGAATA
ATTTATTTTTTAAAAAACTATGAGTTCAGGCCGGGCGCAGTGGCTCACGC
CTGTAAACCCAGCACTTTGGGAGGCCGAGGTGGGCGGATCACCTGAGGTC
AGGAGTTTGAGACCAGCCTGGCCAACATGGTGAAATCCTGTCTCTACTAA
AAATACAAAATTAGCCAGGCATGGTGGTGCATGCCTGTAATCCCAGCTAC
TTGGGAGGCTGAGGCAGGAGAATCACTTGAGCTTGGGAGGTGGAGGTTGC
AATGAGCCAAGGTTGCGCCATTGCACTCAAGCCTGGGCAAAAAGAGCAAA
ACGCCACTCAAAAACAAAAACAAAACAAAACAAAAACACCCCCCCAAAAA
ACAAAACAAAACAATGAGTTCACACTGATACCTCCAATTCCAATACAATA
GCGTAAGGTATTCTCCCTTCCCATACTTCTAACGTCATTCTACCACAGTG
AGAAAGCTGGCTCTGTCATGCTTAATATATTTAGTGACTTAATCAACCAT
CCTGAATGCAACTAACCTCCCATCTAAGCTTCTAGGCCTTCCCCACTTGG
ATGCCTTGTTCTCCCCTCTTGGGCCCTACGGCTAAGACTTTGTGTAGGAC
TGCCTCCCAGGTGTTCAAGCCCTCTTCATTTTCTCAGGTTCCTCAGCCTC
CTTACCTGCTAGGTCACCAACACCTGGCTGTGGATAACCAGGTGTAGATG
TTTCCTTTGTTCTGTACACGTTTCCTTTGTTCTGTACACCTAATGTCTTT
GACACTTAGTATTTTAGGATGGGAAAGGGGAAGAGGAACACTGAATGTGC
ACTTTTAAATGGGTATTGTGCCTCTTATTAAGCTCTTTATTCACATCTTA
TTTCTTTAGTAATTCACAGAATTGGAATTTTTGGATTAAAGTTCTTTTTT
TTTTTGAGACGGGGTCTCACTCTGTCGCCCAGGCTGGAGTGCAGTGGTGT
GATCTTGGATCACTGCAACCTCCGCCTCCCGAGTTCAAGCAATTCTCTGC
CTCAGCCCCCCAAGTAGTTGGGATTACAGGCACCCGCCACCACGCCCAGC
TAATTTTTTGTATTTTTAGTAGAGATGGGTTTCACCATCTTGGCCAGGCT
GGTCTTGAACTCCTGACCTCGTGATCCACCCGTCTCGGCCTCCCAAAGTT
CTGGAATTACAGGCGTGAGCCACCGCGCCTGGCCTGGATGAAAGTTTTTT
TAAAGGGAGTCTTGCTCTGTAGCCCTGGCTGGTGTGCAGTGGTGTGATCA
TAGCTCACTGCAGCCTCAAACTCCTGGGCTCAAGTGATCCTCCAGCCTCA
GCCTCCTCAGTAGCTTGGACGACAGCTGCACACAACCATGCCCAGCTAAT
AGAGACGGGGGACTCACTATGTTGCCCAGGCTAGTCTCGAACTCCTGGGC
TCAAGTGATCCTCTTGCCTGGGCCTCCCAAAATTGGGATTACAGGCGTGA
GCCACCGCTCCTGGCCCGAAAGAGTGTTTTTAAGGCTTTAAAAAAATATT
GCCAACATGGTGAAAACCCGTTTCTACAAAAATACAAAAAGGATCCGGGC
ATGACGGCGAGTGCCTGTAATCCCAGCTACTCAGGAGACTGAGGCAGGAG
AATCGCTTGAACGTGGGAGGCAGAGGTGGTAGTTAGCGGAGATCGCGCCA
CTACACTCCAGGCTGGGCAACTGAGGGAGACACCGTCTTAAAAAAAAAAA
AGTTCCCAAGTCTAAAAAAAAAAAAATCATCAATCTGCTCTCAAAAACTG
TCGCAACAATTTACAATCTCATCAGCACTGAGTATCCATTTCCTTGCACC
CTTCTCAGTAGTATTACCATTAAACAAACAAAATTTATATGCGTCAGTTT
GTTGGGCTCAAAGGAGCCTCTCGACAAGTTTCCTATTCCCCACGCTGCCT
CTCCTCTGGACACAGGAAGGGGTCCTTTTCCTTATTTATTTTGTTATTTC
ATTTTCGTCAACACGGCTCGGCTTGGGGACAGGGGTCGGGGGCAGGCCGG
TTACCGCAGAGGTGGAGGCCGCGCGGCACCTGGCCTGGAGAGCTCACCAC
ACAGCGACACAGACTTCTTCTCAGCTGGGTCCACCTGCTTGCCTCGGGGC
GACAGAGGGCGCCACGGCGTCCGCGACGGACCCCGCCCCCAGGCAGTGCG
CCGCGCTCCCGTGACGTATTTCCGCGTCATCTGCCGCCGAGGCTTGCCCC
CATTGGTTGTCTGCGAGGCAATAGGGGCGGAGCCGAGTGGGAGTGTGGAA
AGCGCCGCATCCCGGGTGGGAGGCGAGGCTTCCCCTTCCCCGCCCCTCCC
CCGGCCTCCAGTCCCTCCCAGGGCCGCTTCGCAGAGCGGCTAGGAGCACG
GCGGCGGCGGCACTTTCCCCGGCAGGAGCTGGAGCTGGGCTCTGGTGCGC
GCGCGGCTGTGCCGCCCGAGCCGGAGGGACTGGTTGGTTGAGAGAGAGAG
AGGAAGGGAATCCCGGGCTGCCGAACCGCACGTTCAGCCCGCTCCGCTCC
TGCAGGGCAGCCTTTCGGCTCTCTGCGCGCGAAGCCGAGTCCCGGGCGGG
TGGGGCGGGGGTCCACTGAGACCGCTACCGGCCCCTCGGCGCTGACGGGA
CCGCGCGGGGCGCACCCGCTGAAGGCAGCCCCGGGGCCCGCGGCCCGGAC
TTGGTCCTGCGCAGCGGGCGCGGGGCAGCGCAGCGGGAGGAAGCGAGAGG
TGCTGCCCTCCCCCCGGAGTTGGAAGCGCGTTACCCGGGTCCAAAATG

[0382] 21) MEK1 and MEK2 (MAP2K2) Mitogen-activated protein kinase kinase 1. Dual specificity protein kinases act as an essential component of the MAP kinase signal transduction pathway and serves as an integration point for multiple biochemical signals. MEK1 and MEK2 are members of the dual specificity protein kinase family, which act as a mitogen-activated protein (MAP) kinase kinases and as extracellular signal-regulated kinases (ERKs). Binding of extracellular ligands such as growth factors, cytokines and hormones to their cell-surface receptors activates RAS and this initiates RAF1 activation. RAF1 then further activates the dual-specificity protein kinases MAP2K1/MEK1 and MAP2K2/MEK2. Both MAP2K1/MEK1 and MAP2K2/MEK2 function specifically in the MAPK/ERK cascade, and catalyze the concomitant phosphorylation of a threonine and a tyrosine residue in a Thr-Glu-Tyr sequence located in the extracellular signal-regulated kinases MAPK3/ERK1 and MAPK1/ERK2, leading to their activation and further transduction of the signal within the MAPK/ERK cascade. Depending on the cellular context, this pathway mediates diverse biological functions such as cell growth and proliferation, adhesion, survival and differentiation, predominantly through the regulation of transcription, metabolism and cytoskeletal rearrangements (reviewed by Roberts and Der; 2007 Oncogene 26, 3291-3310).

[0383] Genetic alterations that activate the mitogen-activated protein kinase (MAP kinase) pathway occur commonly in cancer. For example, the majority of melanomas harbor mutations in the BRAF oncogene, which confers enhanced sensitivity to pharmacologic MAP kinase inhibition (e.g., RAF or MEK inhibitors). Most mutations conferring resistance to MEK inhibition in vitro populated the allosteric drug binding pocket or alpha-helix C and showed robust (approximately 100-fold) resistance to allosteric MEK inhibition (reviewed in Emery et al, 2009; Proc Natl Acad Sci.; 106(48):20411-20416). Other mutations affected MEK1 codons located within or abutting the N-terminal negative regulatory helix (helix A), which also undergo gain-of-function germline mutations in cardiofaciocutaneous (CFC) syndrome. One target of the MAPK/ERK cascade is peroxisome proliferator-activated receptor gamma (PPARG), a nuclear receptor that promotes differentiation and apoptosis. MAP2K1/MEK1 has been shown to export PPARG from the nucleus. The MAPK/ERK cascade is also involved in the regulation of endosomal dynamics, including lysosome processing and endosome cycling through the perinuclear recycling compartment (PNRC), as well as in the fragmentation of the Golgi apparatus during mitosis.

[0384] Protein: MEK2 Gene: MAP2K2 (Homo sapiens, chromosome 19, 4090319-4124126 [NCBI Reference Sequence: NC_{—}000019.9]; start site location: 4123872; strand: negative)

Gene Identification

| | |
|---|---|
| GeneID | 5605 |
| HGNC | 6842 |
| HPRD | 03164 |
| MIM | 601263 |

Targeted Sequences

| | | | Relative |
|---|---|---|---|
| | | | upstream |
| | | | location |
| | | | to gene |
| Sequence | Design | | start |
| ID No: | ID | Sequence (5′-3′) | site |
| 6182 | | CGCCGCAGCCCGAGTCCGAGAGG | 226 |
| 6202 | | GAGGGGCGCTGGGGCTGAGGCGAGCG | 165 |
| 6203 | | CTCGCGATAACGGGATCGGGAGCCGCG | 290 |
| 6235 | MEK2_1 | CCGACGCGAGGCGGTGCCGGGACCGG | 391 |
| 6240 | | CACGGCGCGTGTGCCCAAGCGC | 436 |
| 6299 | | CGTGGACACACGCCCCTAGCCC | 643 |
| 6341 | | TAGACACTTCGGTGAATCGTGCCGC | 1622 |

Target Shift Sequences

| | | Relative |
|---|---|---|
| | | upstream |
| | | location |
| Sequence | | to gene |
| ID No: | Sequence (5′-3′) | start site |
| 6182 | CGCCGCAGCCCGAGTCCGAGAGG | 226 |
| 6183 | GCCGCAGCCCGAGTCCGAGA | 227 |
| 6184 | CCGCAGCCCGAGTCCGAGAG | 228 |
| 6185 | CGCAGCCCGAGTCCGAGAGG | 229 |
| 6186 | GCAGCCCGAGTCCGAGAGGC | 230 |
| 6187 | CAGCCCGAGTCCGAGAGGCA | 231 |
| 6188 | AGCCCGAGTCCGAGAGGCAG | 232 |
| 6189 | GCCCGAGTCCGAGAGGCAGG | 233 |
| 6190 | CCCGAGTCCGAGAGGCAGGG | 234 |
| 6191 | ACGCCGCAGCCCGAGTCCGA | 225 |
| 6192 | GACGCCGCAGCCCGAGTCCG | 224 |
| 6193 | TGACGCCGCAGCCCGAGTCC | 223 |
| 6194 | CTGACGCCGCAGCCCGAGTC | 222 |
| 6195 | GCTGACGCCGCAGCCCGAGT | 221 |
| 6196 | GGCTGACGCCGCAGCCCGAG | 220 |
| 6197 | AGGCTGACGCCGCAGCCCGA | 219 |
| 6198 | AAGGCTGACGCCGCAGCCCG | 218 |
| 6199 | GAAGGCTGACGCCGCAGCCC | 217 |
| 6200 | AGAAGGCTGACGCCGCAGCC | 216 |
| 6201 | AAGAAGGCTGACGCCGCAGC | 215 |
| 6202 | GAGGGGCGCTGGGGCTGAGGCGAGCG | 165 |
| 6203 | CTCGCGATAACGGGATCGGGAGCCGCG | 291 |
| 6204 | TCGCGATAACGGGATCGGGA | 292 |
| 6205 | TCTCGCGATAACGGGATCGG | 290 |
| 6206 | TTCTCGCGATAACGGGATCG | 289 |
| 6207 | CTTCTCGCGATAACGGGATC | 288 |
| 6208 | GCTTCTCGCGATAACGGGAT | 287 |
| 6209 | GGCTTCTCGCGATAACGGGA | 286 |
| 6210 | CGGCTTCTCGCGATAACGGG | 285 |
| 6211 | CCGGCTTCTCGCGATAACGG | 284 |
| 6212 | ACCGGCTTCTCGCGATAACG | 283 |
| 6213 | GACCGGCTTCTCGCGATAAC | 282 |
| 6214 | GGACCGGCTTCTCGCGATAA | 281 |
| 6215 | CGGACCGGCTTCTCGCGATA | 280 |
| 6216 | GCGGACCGGCTTCTCGCGAT | 279 |
| 6217 | CGCGGACCGGCTTCTCGCGA | 278 |
| 6218 | TCGCGGACCGGCTTCTCGCG | 277 |
| 6219 | ATCGCGGACCGGCTTCTCGC | 276 |
| 6220 | GATCGCGGACCGGCTTCTCG | 275 |
| 6221 | AGATCGCGGACCGGCTTCTC | 274 |
| 6222 | AAGATCGCGGACCGGCTTCT | 273 |
| 6223 | CAAGATCGCGGACCGGCTTC | 272 |
| 6224 | ACAAGATCGCGGACCGGCTT | 271 |
| 6225 | CACAAGATCGCGGACCGGCT | 270 |
| 6226 | CCACAAGATCGCGGACCGGC | 269 |
| 6227 | GCCACAAGATCGCGGACCGG | 268 |
| 6228 | GGCCACAAGATCGCGGACCG | 267 |
| 6229 | CGGCCACAAGATCGCGGACC | 266 |
| 6230 | GCGGCCACAAGATCGCGGAC | 265 |
| 6231 | GGCGGCCACAAGATCGCGGA | 264 |
| 6232 | GGGCGGCCACAAGATCGCGG | 263 |
| 6233 | GGGGCGGCCACAAGATCGCG | 262 |
| 6234 | AGGGGCGGCCACAAGATCGC | 261 |
| 6235 | CCGACGCGAGGCGGTGCCGGGACCGG | 391 |
| 6236 | CGACGCGAGGCGGTGCCGGG | 392 |
| 6237 | ACCGACGCGAGGCGGTGCCG | 390 |
| 6238 | GACCGACGCGAGGCGGTGCC | 389 |
| 6239 | AGACCGACGCGAGGCGGTGC | 388 |
| 6240 | CACGGCGCGTGTGCCCAAGCGC | 436 |
| 6241 | ACGGCGCGTGTGCCCAAGCG | 437 |
| 6242 | CGGCGCGTGTGCCCAAGCGC | 438 |
| 6243 | GGCGCGTGTGCCCAAGCGCT | 439 |
| 6244 | GCGCGTGTGCCCAAGCGCTT | 440 |
| 6245 | CGCGTGTGCCCAAGCGCTTG | 441 |
| 6246 | GCGTGTGCCCAAGCGCTTGG | 442 |
| 6247 | CGTGTGCCCAAGCGCTTGGG | 443 |
| 6248 | GTGTGCCCAAGCGCTTGGGG | 444 |
| 6249 | TGTGCCCAAGCGCTTGGGGC | 445 |
| 6250 | GTGCCCAAGCGCTTGGGGCA | 446 |
| 6251 | TGCCCAAGCGCTTGGGGCAT | 447 |
| 6252 | GCCCAAGCGCTTGGGGCATG | 448 |
| 6253 | CCCAAGCGCTTGGGGCATGA | 449 |
| 6254 | CCAAGCGCTTGGGGCATGAG | 450 |
| 6255 | CAAGCGCTTGGGGCATGAGG | 451 |
| 6256 | AAGCGCTTGGGGCATGAGGC | 452 |
| 6257 | AGCGCTTGGGGCATGAGGCG | 453 |
| 6258 | GCGCTTGGGGCATGAGGCGC | 454 |
| 6259 | CGCTTGGGGCATGAGGCGCG | 455 |
| 6260 | GCTTGGGGCATGAGGCGCGG | 456 |
| 6261 | CTTGGGGCATGAGGCGCGGG | 457 |
| 6262 | CCACGGCGCGTGTGCCCAAG | 435 |
| 6263 | ACCACGGCGCGTGTGCCCAA | 434 |
| 6264 | TACCACGGCGCGTGTGCCCA | 433 |
| 6265 | TTACCACGGCGCGTGTGCCC | 432 |
| 6266 | CTTACCACGGCGCGTGTGCC | 431 |
| 6267 | CCTTACCACGGCGCGTGTGC | 430 |
| 6268 | GCCTTACCACGGCGCGTGTG | 429 |
| 6269 | TGCCTTACCACGGCGCGTGT | 428 |
| 6270 | TTGCCTTACCACGGCGCGTG | 427 |
| 6271 | CTTGCCTTACCACGGCGCGT | 426 |
| 6272 | GCTTGCCTTACCACGGCGCG | 425 |
| 6273 | CGCTTGCCTTACCACGGCGC | 424 |
| 6274 | TCGCTTGCCTTACCACGGCG | 423 |
| 6275 | CTCGCTTGCCTTACCACGGC | 422 |
| 6276 | CCTCGCTTGCCTTACCACGG | 421 |
| 6277 | CCCTCGCTTGCCTTACCACG | 420 |
| 6278 | GCCCTCGCTTGCCTTACCAC | 419 |
| 6279 | CGCCCTCGCTTGCCTTACCA | 418 |
| 6280 | GCGCCCTCGCTTGCCTTACC | 417 |
| 6281 | GGCGCCCTCGCTTGCCTTAC | 416 |
| 6282 | GGGCGCCCTCGCTTGCCTTA | 415 |
| 6283 | CGGGCGCCCTCGCTTGCCTT | 414 |
| 6284 | CCGGGCGCCCTCGCTTGCCT | 413 |
| 6285 | ACCGGGCGCCCTCGCTTGCC | 412 |
| 6286 | GACCGGGCGCCCTCGCTTGC | 411 |
| 6287 | GGACCGGGCGCCCTCGCTTG | 410 |
| 6288 | GGGACCGGGCGCCCTCGCTT | 409 |
| 6289 | CGGGACCGGGCGCCCTCGCT | 408 |
| 6290 | CCGGGACCGGGCGCCCTCGC | 407 |
| 6291 | GCCGGGACCGGGCGCCCTCG | 406 |
| 6292 | TGCCGGGACCGGGCGCCCTC | 405 |
| 6293 | GTGCCGGGACCGGGCGCCCT | 404 |
| 6294 | GGTGCCGGGACCGGGCGCCC | 403 |
| 6295 | CGGTGCCGGGACCGGGCGCC | 402 |
| 6296 | GCGGTGCCGGGACCGGGCGC | 401 |
| 6297 | GGCGGTGCCGGGACCGGGCG | 400 |
| 6298 | AGGCGGTGCCGGGACCGGGC | 399 |
| 6299 | CGTGGACACACGCCCCTAGCCC | 648 |
| 6300 | GTGGACACACGCCCCTAGCC | 649 |
| 6301 | TGGACACACGCCCCTAGCCC | 650 |
| 6302 | GGACACACGCCCCTAGCCCC | 651 |
| 6303 | GACACACGCCCCTAGCCCCC | 652 |
| 6304 | ACACACGCCCCTAGCCCCCA | 653 |
| 6305 | CACACGCCCCTAGCCCCCAC | 654 |
| 6306 | ACACGCCCCTAGCCCCCACC | 655 |
| 6307 | CACGCCCCTAGCCCCCACCG | 656 |
| 6308 | ACGCCCCTAGCCCCCACCGC | 657 |
| 6309 | CGCCCCTAGCCCCCACCGCC | 658 |
| 6310 | GCCCCTAGCCCCCACCGCCT | 659 |
| 6311 | CCCCTAGCCCCCACCGCCTT | 660 |
| 6312 | CCCTAGCCCCCACCGCCTTA | 661 |
| 6313 | CCTAGCCCCCACCGCCTTAG | 662 |
| 6314 | CTAGCCCCCACCGCCTTAGA | 663 |
| 6315 | TAGCCCCCACCGCCTTAGAG | 664 |
| 6316 | AGCCCCCACCGCCTTAGAGT | 665 |
| 6317 | GCCCCCACCGCCTTAGAGTG | 666 |
| 6318 | CCCCCACCGCCTTAGAGTGT | 667 |
| 6319 | CCCCACCGCCTTAGAGTGTC | 668 |
| 6320 | CCCACCGCCTTAGAGTGTCA | 669 |
| 6321 | CCACCGCCTTAGAGTGTCAG | 670 |
| 6322 | CACCGCCTTAGAGTGTCAGT | 671 |
| 6323 | ACCGCCTTAGAGTGTCAGTT | 672 |
| 6324 | CCGCCTTAGAGTGTCAGTTA | 673 |
| 6325 | CGCCTTAGAGTGTCAGTTAC | 674 |
| 6326 | GCGTGGACACACGCCCCTAG | 647 |
| 6327 | AGCGTGGACACACGCCCCTA | 646 |
| 6328 | AAGCGTGGACACACGCCCCT | 645 |
| 6329 | CAAGCGTGGACACACGCCCC | 644 |
| 6330 | GCAAGCGTGGACACACGCCC | 643 |
| 6331 | GGCAAGCGTGGACACACGCC | 642 |
| 6332 | TGGCAAGCGTGGACACACGC | 641 |
| 6333 | TTGGCAAGCGTGGACACACG | 640 |
| 6334 | TTTGGCAAGCGTGGACACAC | 639 |
| 6335 | TTTTGGCAAGCGTGGACACA | 638 |
| 6336 | TTTTTGGCAAGCGTGGACAC | 637 |
| 6337 | CTTTTTGGCAAGCGTGGACA | 636 |
| 6338 | TCTTTTTGGCAAGCGTGGAC | 635 |
| 6339 | ATCTTTTTGGCAAGCGTGGA | 634 |
| 6340 | AATCTTTTTGGCAAGCGTGG | 633 |
| 6341 | TAGACACTTCGGTGAATCGTGCCGC | 1598 |
| 6342 | AGACACTTCGGTGAATCGTG | 1599 |
| 6343 | GACACTTCGGTGAATCGTGC | 1600 |
| 6344 | ACACTTCGGTGAATCGTGCC | 1601 |
| 6345 | CACTTCGGTGAATCGTGCCG | 1602 |
| 6346 | ACTTCGGTGAATCGTGCCGC | 1603 |
| 6347 | CTTCGGTGAATCGTGCCGCT | 1604 |
| 6348 | TTCGGTGAATCGTGCCGCTA | 1605 |
| 6349 | TCGGTGAATCGTGCCGCTAT | 1606 |
| 6350 | CGGTGAATCGTGCCGCTATG | 1607 |
| 6351 | GGTGAATCGTGCCGCTATGA | 1608 |
| 6352 | GTGAATCGTGCCGCTATGAA | 1609 |
| 6353 | TGAATCGTGCCGCTATGAAC | 1610 |
| 6354 | GAATCGTGCCGCTATGAACA | 1611 |
| 6355 | AATCGTGCCGCTATGAACAC | 1612 |
| 6356 | ATCGTGCCGCTATGAACACA | 1613 |
| 6357 | TCGTGCCGCTATGAACACAG | 1614 |
| 6358 | CGTGCCGCTATGAACACAGA | 1615 |
| 6359 | GTGCCGCTATGAACACAGAT | 1616 |
| 6360 | TGCCGCTATGAACACAGATG | 1617 |
| 6361 | GCCGCTATGAACACAGATGT | 1618 |
| 6362 | CCGCTATGAACACAGATGTA | 1619 |
| 6363 | CGCTATGAACACAGATGTAC | 1620 |
| 6364 | CTAGACACTTCGGTGAATCG | 1597 |
| 6365 | ACTAGACACTTCGGTGAATC | 1596 |
| 6366 | CACTAGACACTTCGGTGAAT | 1595 |
| 6367 | CCACTAGACACTTCGGTGAA | 1594 |
| 6368 | GCCACTAGACACTTCGGTGA | 1593 |
| 6369 | TGCCACTAGACACTTCGGTG | 1592 |
| 6370 | CTGCCACTAGACACTTCGGT | 1591 |
| 6371 | TCTGCCACTAGACACTTCGG | 1590 |
| 6372 | ATCTGCCACTAGACACTTCG | 1589 |

```
Hot Zones (Relative upstream location to gene start site)
  1-750
  900-1700
2550-2900
4150-4500
```

### Examples

[0385] In FIG. 40, In HCT-116 (human colorectal carcinoma cell line), MEK2_{—}1 (224) produced statistically significant (P<0.05) inhibition at 10 μM compared to the untreated and negative control values. The MEK2 sequences MEK2_{—}1 (224) fits the independent and dependent DNAi motif claims.

[0386] The secondary structure for MEK2_{—}1 (224) is shown in FIG. 41.

Genetic Code (5′ Upstream Region)

(SEQ ID NO: 11970)

GGAACTACAGGTGCCCGCCACCACGCCTGGCTAATTTTTTTGTATTTTTA
GTAGAGACAGGGTTTCACTGTGTTAGCCAGGATGGTCTCTGGTCTCGATC
TCCTGACCTCGTGATCTGCCTGCCTCAGCCTCCCAAAGTGCTGGGATTAC
AGGCGTGAGCCACCGCGCCCGGCCTTGTATTTTTAGTAGAGACAGGGTTT
GTCCATGTTGGTCAGGCTGGTATCGAACTCCCGACCTCAGGTGATCCACC
CGCCTCGGCCTCCCAAAGTGCAGGGATTATAGGCATGAGCCACCACATCT
GGTCTTCTTCTTTTTTTTTTTTTTTTTGAGACAGAGTCTCCCTCAGGCTG
GAGTGCGGTGGCACGATCTTGGCTCACTGCAACCTCCACCTCTCAGGTTC
AAGTAATTCTCGTGCCTCAGCCTCCCAAGTAGCTGAGACTACAGGCACCT
GCCACCATGCCCAGCTAATTTTTTTTTTTTTTCCGAGATGGAGCCTTACT
CTGTTGCCCAGGCTGGAGTGCAGGGGCACAATCTTGGCTCACTGCAACCT
CCACCTCCGGGGTTCAAGCAGTTCTCCTGCCTCAGCCTCCCGAGTAGCTG
GGATTACAGGTGCCCACCACCATGCCCGGCTAATTTTTGTGTGTTTTTAG
TAGAGACGGGGTTTCACCATGTTGGTCAGGCTGGTCTTGAACTCTTGACC
TCAGGTGATCTGCCCACCTCGGCTTGCCAAAGTGCTGTGATTACACCCGT
GACCAGCCTAATTTTTGTATATTTAGTAGAGATGGGGTTTCACCATGTTG
GCCAGGCTGGACTCGAACTCCTGACCTCAAGTGATCACCTGCTTTGGCCT
CCCAAAGTGCTGGGATTGCAGGTGTGAGCCACCACACCCGGCCTCTCCTT
ATTTTAATGGCTCATTGTTAAACATTTACCAGCTCACTACTGCTGGGTGC
AGAGGAAGAGAATGAACTAAAAAGGCAGTGAACAGACTTTCTGGAGTAAG
GGGAAGTGTTACATGGATGTATAGAGTTGTAATAATCCAAGAAATTGAAC
TTCAGAAACTTGTGCATTAATAGGTGAGTGCAGTGGCTCACGGCTCTAGT
CCCAGCACTGCTGAGGACGAGGCAGGAGGATCGCTTGAGCCTAGGAGTGT
GAGACCAGCCTGAGTGACATGGAGAAACCCTGTCTGGACAAAAAATACAA
AAATTAGCCGAGTGTGGTGGCGTATGTTTGTAGCCAGGGCTACTAGGGAG
GCTGAGGTGGGAGAATCGCTTGAGCCAGGGAGGTGGAGGCTGCAGAGAGT
TATGATCGTGCCACTGCACTCCAGCCTGAGGCCTGGGTGACAGAGTCAGA
ACTTGTCTTAAAAAGAAAAAAAAAGCCTAAAATAGGATAAAATGGGAGAA
AGATTGCTAGGCAAAACAGAAGGAACATGGAAATAGCCCTGTCTCTGAAA
GGGCCTGTCCTTATTTGAGGCCACATATGCATCCATCTGAATTTTGGACA
AGCGGGTGGGAGCGATGAGAAGTAAAACTGAAAGGCCCAGATTGTAAAAA
CCCAGGAGCAGGCTTCCCCAGGAGCAGTGTTTTGTTTGTTGTTTTGTTTT
GTTTTGTTTTTTTCGAGATGGAGTCTCGGTCGGTCGCCCAGGCTGGAGTG
CAATGGCGTGATCTCGGCTCACTGCAACCTCCACCTCCCGGGTTTAAGCG
ATTCTCCTGCCTCAGCCTCCCGAGTAGCTGGGACTACAGGCACGCATCAC
CACACCCAGTTAATTTTTGTATTTTTAGTAGAGACGGGGTTTCACCATGT
TGGCCAGGATAGTCTCAATCTCTTGACCTCATGATCCACCTGCCTTGGCT
TCCCAAAGTGCTGGGATTACAGGCGTGAGCCACCGCGCCCGGCCAGTTGG
TTGGTTTTGTTTTTTGAGCGTGAGTCTGGCTCTGTCGCCCAGGCTGGAAT
GCGATGGCACAATCTCGGCTCACTGCAACCTCCGCCTCCGGGGTTCAGTT
ATCCCACCTCAGCCTCCCTAGTAGCTGGAATTACAGCCACCCGCCACCAC
ACCTGTGTAATTTTTGTATTTTTAGTAGAGACGAGGTTTCACCATGTTGG
CCAGGTTGGTCTCGAACTCCTGACCTCAAGTGATCAGCCCACCTCAGCTT
CCCAGGGTCCTGGGATTACAGGTGTGAGCCACGGCACCTGGCAAAAAATT
AAATTTTTTTTTGTTCTGTTTTATTGGAGACGGAGTCTTACTTTGTCGCC
CAGGCTGGAGGGCAGTGGTGCAATCTTGGCTCACTGCAACGTCTGCCCCC
CGGGTTCAAGCGATTCTCCTGCCTCAGCCGCCTGAGTAGCTGAGACTATA
GGCACACACCGCCAGGCCTGGCTAATTTTTGTATTTTATTTATTTATTTG
TTTGTTTGTTTGTTTGTTTGATTTTTTTGAGACGAAGTCTCGCTCTTGTC
TCCCAAGCTGGAGTGCAATGGCGTGATCTTGGCTCACTGCAACCTCTGCC
TCCCGGGTTCAAGCAATTCTTCTGCCTCAACCTCGCGAGTAGCTGGGATT
ACAGGCACGCGCCACCATGCCCGGCTAATTTTTGTATTTTTTTGTTTTAG
TAGAGACGGGGTTTCACCATGTTGGCCAGACTCGTCTTCAACTCCTGACC
TCAGGTGATCCACCCGCCTCGACCTCCCAAAGTGCTGGGATTACAGGCGT
GAGCCACCGCGCCCAGCCTATGACCTTTCTTATAAAGTGGTACGGCTATT
GTATTAAATAGTAAGGTGGTGCTTCAAAAAGTTCAACATAGAATTACCAT
ATAATCCAGTAATTCCTCTTCAGAACATATACCCAAAAGAACTCAAGGCA
AGGACTCAAACAGATATTTGTACATCTGTGTTCATAGCGGCACGATTCAC
CGAAGTGTCTAGTGGCAGATAAATGGATAAGCAAAATATAGTCCATGCAC
ACAATAGAATATTATTCAGCCTTAAAAAGGAGGAAAATCCTGACTGGGTG
CGGTGGCTCACGCCTGTAATCCCAGCACTTTGGGAGATCGAGGCGGGTGG
ATCACGAGGTCAGGAGATGGAGACCATCCTGGCTAACACGGTGAAACCCC
GTCTCTACTAAAAATACAAAAAAATTAGCCGGGCATGGTGGTGGGCACCT
GTAGTCCCAGCTACTCGGGAGGCTGAGGCAGGAGAATGGCGTGAACCCGG
GAGGCAGAGTTTGCAGTGGGCCGAGATCGCACCACTGCACTCCAGCCTGG
GTGACAGAGCGAGACTCCGTCTCAAAAAAAAAAAAAGGGAAATTTTTCTT
TTTTTTTTTTTTTCTGCTCTTTTTTGGAGCAGGGCTACCCGATTGGAAGT
ATGCCCGGAGTAGTCAAGTGGGTAAATTCTAACACAGGTTACAACGTGGA
TCTAACACAGCTACAACAGGCACCTTGAGGACGTGGCCCTCAGTGAAATA
TGCCAGCCACAAAGGGACAAAACCTGTGTGATCCTACTCATATGAAGTCC
CTAGAATCATCAGATTCACAGGAAGTACGACGTTGGGTTCCAGGGGCTGG
GGAGGGGGATAGGGAGTGAGGTTTCATAGGGGACAGTGTTTCAGTTTCGG
AAGATGAGAAAATTCTGGAGATGGTGGTGGTGGTGGTTGCTTAATGCCGC
TGAGCTGTGCATTTAGAAATGGTTAAAATGACAAGTTTTATGTTATGTGT
ATTTTATAATAAAAATGTTTCAACATGCGCATAGTAATATATGCAATTTT
ATTTGTCAATTAAAATAAATTTTAAAAATGTTTTAGAGTGGCCTTGTTCT
GATGAAGGAGGGGGAGTAACTGACACTCTAAGGCGGTGGGGGCTAGGGGC
GTGTGTCCACGCTTGCCAAAAAGATTAAATGGACTCTGGGTGGGTCTCGT
CCACTGTTCTGGGGTCTTACGGGTTCTCTCAGCCCCAGCCTGGGGCACCA
CAGGCTCTCAGGAGTCTGGCTACCCTGCCCACCTGTGCACGACCATCACC
CCAGCCTTCATCCCTCCGTCTCCTCCCCTGCTCCCGCGCCTCATGCCCCA
AGCGCTTGGGCACACGCGCCGTGGTAAGGCAAGCGAGGGCGCCCGGTCCC
GGCACCGCCTCGCGTCGGTCTCCGCCCCTTTCCCCTCCGAAAGGCGGCCT
TGTGCTGCTGCGCAGGCGCGGCGGCTGGGGGTGGGGTCCATCGCGGCTCC
CGATCCCGTTATCGCGAGAAGCCGGTCCGCGATCTTGTGGCCGCCCCTCC
CCTCCCCCTGCCTCTCGGACTCGGGCTGCGGCGTCAGCCTTCTTCGGGCC
TCGGCAGCGGTAGCGGCTCGCTCGCCTCAGCCCCAGCGCCCCTCGGCTAC
CCTCGGCCCAGGCCCGCAGCGCCGCCCGCCCTCGGCCGCCCCGACGCCGG
CCTGGGCCGCGGCCGCAGCCCCGGGCTCGCGTAGGCGCCGACCGCTCCCG
GCCCGCCCCCTATGGGCCCCGGCTAGAGGCGCCGCCGCCGCCGGCCCGCG
GAGCCCCGATG

[0387] 22. CD4. CD4 (cluster of differentiation 4) is a glycoprotein found on the surface of immune cells such as T helper cells, monocytes, macrophages, and dendritic cells. In humans, the CD4 protein is encoded by the CD4 gene (Isobe et al., Proc. Natl. Acad. Sci. U.S.A. 1986; 83 (12): 4399-402). CD4+ T helper cells are white blood cells that are an essential part of the human immune system, often referred to as CD4 cells, T-helper cells or T4 cells. These helper cells send signals to other types of immune cells, including CD8 killer cells which in turn destroy and kill the infection or virus. If CD4 cells become depleted, for example in untreated HIV infection, or following immune suppression prior to a transplant, the body is left vulnerable to a wide range of infections that it would otherwise have been able to fight.

[0388] HIV-1 uses CD4 to gain entry into host T-cells and achieves this by binding to the viral envelope protein known as gp120 (Kwong et al., Nature 393 (6686): 648-59). The binding to CD4 creates a shift in the conformation of gp120 allowing HIV-1 to bind to a co-receptor expressed on the host cell. These co-receptors are chemokine receptors CCR5 or CXCR4. Following a structural change in another viral protein (gp41), HIV inserts a fusion peptide into the host cell that allows the outer membrane of the virus to fuse with the cell membrane. CD4 is also expressed in neoplasms derived from from T helper cells, e.g. peripheral T cell lymphoma and related malignant conditions and has been associated with a number of autoimmune diseases such as vitiligo and type I diabetes mellitus (Zamani et al., Clin. Exp. Dermatol. 35 (5): 521-4).

[0389] Protein: CD4 Gene: CD4 (Homo sapiens, chromosome 12, 6898638-6929976 [NCBI Reference Sequence: NC_{—}000012.11]; start site location: 6909305; strand: positive)

Gene Identification

| | |
|---|---|
| GeneID | 920 |
| HGNC | 1678 |
| HPRD | 01740 |
| MIM | 186940 |

Targeted Sequences

| | | Relative |
|---|---|---|
| | | upstream |
| | | location |
| Sequence | | to gene |
| ID No: | Sequence (5′-3′) | start site |
| 6373 | GAGCCACTGCGCCCGGCCTCATTAAGGGCAT | 12485 |
| 6406 | CGAACAACTTCATTACAATTCGACAAGCGC | 13299 |
| 6407 | CGTAGTTAAGCGTGTACCAGCCCAAGGC | 13189 |
| 6421 | GAGCGGTGACCGTGTCTGTCTTAG | 13751 |
| 6447 | CGGTTTGCAGATTCCAGACCCGATGGACG | 15100 |

Target Shift Sequences

| | | Relative |
|---|---|---|
| | | upstream |
| | | location |
| Sequence | | to gene |
| ID No: | Sequence (5′-3′) | start site |
| 6373 | GAGCCACTGCGCCCGGCCTCATTAAGGGCAT | 12485 |
| 6374 | AGCCACTGCGCCCGGCCTCA | 12486 |
| 6375 | GCCACTGCGCCCGGCCTCAT | 12487 |
| 6376 | CCACTGCGCCCGGCCTCATT | 12488 |
| 6377 | CACTGCGCCCGGCCTCATTA | 12489 |
| 6378 | ACTGCGCCCGGCCTCATTAA | 12490 |
| 6379 | CTGCGCCCGGCCTCATTAAG | 12491 |
| 6380 | TGCGCCCGGCCTCATTAAGG | 12492 |
| 6381 | GCGCCCGGCCTCATTAAGGG | 12493 |
| 6382 | CGCCCGGCCTCATTAAGGGC | 12494 |
| 6383 | GCCCGGCCTCATTAAGGGCA | 12495 |
| 6384 | CCCGGCCTCATTAAGGGCAT | 12496 |
| 6385 | CCGGCCTCATTAAGGGCATT | 12497 |
| 6386 | CGGCCTCATTAAGGGCATTC | 12498 |
| 6387 | CGAGCCACTGCGCCCGGCCT | 12484 |
| 6388 | ACGAGCCACTGCGCCCGGCC | 12483 |
| 6389 | CACGAGCCACTGCGCCCGGC | 12482 |
| 6390 | GCACGAGCCACTGCGCCCGG | 12481 |
| 6391 | GGCACGAGCCACTGCGCCCG | 12480 |
| 6392 | AGGCACGAGCCACTGCGCCC | 12479 |
| 6393 | CAGGCACGAGCCACTGCGCC | 12478 |
| 6394 | ACAGGCACGAGCCACTGCGC | 12477 |
| 6395 | TACAGGCACGAGCCACTGCG | 12476 |
| 6396 | TTACAGGCACGAGCCACTGC | 12475 |
| 6397 | ATTACAGGCACGAGCCACTG | 12474 |
| 6398 | GATTACAGGCACGAGCCACT | 12473 |
| 6399 | GGATTACAGGCACGAGCCAC | 12472 |
| 6400 | GGGATTACAGGCACGAGCCA | 12471 |
| 6401 | TGGGATTACAGGCACGAGCC | 12470 |
| 6402 | CTGGGATTACAGGCACGAGC | 12469 |
| 6403 | GCTGGGATTACAGGCACGAG | 12468 |
| 6404 | TGCTGGGATTACAGGCACGA | 12467 |
| 6405 | GTGCTGGGATTACAGGCACG | 12466 |
| 6406 | CGAACAACTTCATTACAATTCGACAAGCGC | 13299 |
| 6407 | CGTAGTTAAGCGTGTACCAGCCCAAGGC | 13189 |
| 6408 | GTAGTTAAGCGTGTACCAGC | 13190 |
| 6409 | TAGTTAAGCGTGTACCAGCC | 13191 |
| 6410 | AGTTAAGCGTGTACCAGCCC | 13192 |
| 6411 | GTTAAGCGTGTACCAGCCCA | 13193 |
| 6412 | TTAAGCGTGTACCAGCCCAA | 13194 |
| 6413 | TAAGCGTGTACCAGCCCAAG | 13195 |
| 6414 | AAGCGTGTACCAGCCCAAGG | 13196 |
| 6415 | AGCGTGTACCAGCCCAAGGC | 13197 |
| 6416 | GCGTGTACCAGCCCAAGGCA | 13198 |
| 6417 | CGTGTACCAGCCCAAGGCAC | 13199 |
| 6418 | ACGTAGTTAAGCGTGTACCA | 13188 |
| 6419 | TACGTAGTTAAGCGTGTACC | 13187 |
| 6420 | GTACGTAGTTAAGCGTGTAC | 13186 |
| 6421 | GAGCGGTGACCGTGTCTGTCTTAG | 13751 |
| 6422 | AGCGGTGACCGTGTCTGTCT | 13752 |
| 6423 | GCGGTGACCGTGTCTGTCTT | 13753 |
| 6424 | CGGTGACCGTGTCTGTCTTA | 13754 |
| 6425 | GGTGACCGTGTCTGTCTTAG | 13755 |
| 6426 | GTGACCGTGTCTGTCTTAGT | 13756 |
| 6427 | TGACCGTGTCTGTCTTAGTT | 13757 |
| 6428 | GACCGTGTCTGTCTTAGTTA | 13758 |
| 6429 | ACCGTGTCTGTCTTAGTTAG | 13759 |
| 6430 | CCGTGTCTGTCTTAGTTAGC | 13760 |
| 6431 | CGTGTCTGTCTTAGTTAGCA | 13761 |
| 6432 | AGAGCGGTGACCGTGTCTGT | 13750 |
| 6433 | CAGAGCGGTGACCGTGTCTG | 13749 |
| 6434 | CCAGAGCGGTGACCGTGTCT | 13748 |
| 6435 | GCCAGAGCGGTGACCGTGTC | 13747 |
| 6436 | GGCCAGAGCGGTGACCGTGT | 13746 |
| 6437 | AGGCCAGAGCGGTGACCGTG | 13745 |
| 6438 | CAGGCCAGAGCGGTGACCGT | 13744 |
| 6439 | ACAGGCCAGAGCGGTGACCG | 13743 |
| 6440 | CACAGGCCAGAGCGGTGACC | 13742 |
| 6441 | TCACAGGCCAGAGCGGTGAC | 13741 |
| 6442 | CTCACAGGCCAGAGCGGTGA | 13740 |
| 6443 | GCTCACAGGCCAGAGCGGTG | 13739 |
| 6444 | AGCTCACAGGCCAGAGCGGT | 13738 |
| 6445 | TAGCTCACAGGCCAGAGCGG | 13737 |
| 6446 | CTAGCTCACAGGCCAGAGCG | 13736 |
| 6447 | CGGTTTGCAGATTCCAGACCCGATGGACG | 15100 |
| 6448 | CCGGTTTGCAGATTCCAGAC | 15099 |
| 6449 | ACCGGTTTGCAGATTCCAGA | 15098 |
| 6450 | CACCGGTTTGCAGATTCCAG | 15097 |
| 6451 | CCACCGGTTTGCAGATTCCA | 15096 |
| 6452 | CCCACCGGTTTGCAGATTCC | 15095 |
| 6453 | GCCCACCGGTTTGCAGATTC | 15094 |
| 6454 | GGCCCACCGGTTTGCAGATT | 15093 |
| 6455 | GGGCCCACCGGTTTGCAGAT | 15092 |
| 6456 | TGGGCCCACCGGTTTGCAGA | 15091 |
| 6457 | TTGGGCCCACCGGTTTGCAG | 15090 |
| 6458 | TTTGGGCCCACCGGTTTGCA | 15089 |
| 6459 | CTTTGGGCCCACCGGTTTGC | 15088 |
| 6460 | GCTTTGGGCCCACCGGTTTG | 15087 |
| 6461 | AGCTTTGGGCCCACCGGTTT | 15086 |
| 6462 | TAGCTTTGGGCCCACCGGTT | 15085 |
| 6463 | CTAGCTTTGGGCCCACCGGT | 15084 |
| 6464 | TCTAGCTTTGGGCCCACCGG | 15083 |
| 6465 | CTCTAGCTTTGGGCCCACCG | 15082 |

Hot Zones (Relative upstream location to gene start site)
12350-12500
13100-13300
13700-13800
15000-15200

### Examples

Genetic Code (5′ Upstream Region)

(SEQ ID NO: 11971)

ATCTAATCTATCTATATCTGTCTATCTATCTTTATGTATCTATCTTATCT
ATTGATCTATCTATCTTTTTTTTTTTTTGAGACAGAGTCACTCTGTCACC
CAGGCTGGAGTGCAGTGGCACGATCTCGGCTCACTGCAACCTCCGCCTCC
CGGGTTCAAGCGATTCTCCTACCTCAGCCTCCTCAGTAGCTGGGACTACC
CACCACCACTCCTGGCTAATTTTTGTATTTTCAGTAGAGATAGGGTTTCA
CTATGTTGGCCAGGCTGGTCTCCAACTCCTGACCTAAAGTGATCCACCCA
CCTTGGTTTCCCAAAGTGCTGGGATTACAGGCGTGAGCCACCGTGCCTGG
ACATATATCTATCTTTTTTTTTTTTGAGATGGAGTCTCGCTCTGTTGCCC
AGGCTGGAGTGCAGTGGCGTGATTTCGGCTCACTGCAACCTCCGCCTCCC
GGGTTCAAGTGATTCTCCTGCCTCAGCCTCCCAAGTAGCTGAGATTACAG
ACGTGCGTCACCATGCCCAGCTAATTTTTGTATTTTTAGTAGAGATGGGA
TTTCACTATGTTGGCCAGGCTGGTCTCGTACTCCCGACCTCAGGTGATCC
ACTTGCCTTGGCCTCCCAAAGTGCTGGAATTACAGGTGTGAGCCACTGCA
TCCGGCCTTATATATCTATCTTGTCTGTCTGACTGTCTAATCTAATTCAT
CTATTTTATCTGTTTATCTTATCTATCATCTATTTATCTAATCTATCTGT
CTGTATGTCTGTTTTTTTTTTGTTTTTTTTTTTTTTTTGAGATAGAGTCT
TGCTCTGTCGCCGAGGCTGGAGTGCGGTGGCGCGATCTCAGCTCACTGCT
GAACCTCCGCCTCCTGGGTTCTAAGCGATTCTCCTGCCTCAATCTTTGGA
GTAGCTGGGATTACAGGCCCGTACCACTGTGCCCGGCTAATTTTGTATTT
TTAGTAGAGAAGGGTTTCACCATGTTGGTCAGGCTTGTATTGAACTCCTG
ACCTCAGGTGATCTACCCGCCTAAGCCTCCCAAAGTGCTGGGAGTACAGG
TGTGAGCCACTGTGTCTGTCCCTAAATGTCTGTCTCTATCTATCTATCTA
TCTATCTATCTATCTATCTATCTAATCTATCTTTCTGTCTAACCTAATCT
ATTTTATCTATCTTATTCATCATCTATCTAATCTGTCTGTATGTTTATCT
AATCTATTTACCTAATCTATCAATCTATCATCTAATCTATCTAATCTGTC
TATCTAATCTATTTTATCTATCTATCTATCTGTCCATCCATCTATCTACC
TACCTGTCTATCTCAAGCACCTACCACGTATTAAGCCCTGGCTACCTCCT
CTTCCAGGCAGATGGAGTAACTGGAGGCAGCTAACAAAGATGGAGTCACT
TTTCTTATCTTCTCCTAAACCACCGTAAGAGGACCAAGCCCCCACACCTT
CTGAGTGCCCCATTCCTCTCCACAGATTGTGTCTTAGTGCCCAGCAGGAA
ACACAGTCCACCTCCCATGGTTCAAGAGATTGTAGAAAGGGGGTTATTCA
CATAGGTTAAGGGAATCAATCAATTTGAAGCACAGACACTATTAACAGCA
GGAAGAGTCCTGAAGAAGTGAAAATGGTGTTTCTGGAACCCAGAGAGTGC
TTGCACTCTGGATAAGGGGCCACCCCACAGAAGCTGTGGAGGGGCAGGGC
TGCAGGTGAGGATGAACACACAGCTATTGACAGAAAATATGCCCAGGGCA
GGGATAGAGTAGGAAAAATATCCCAGCTTCTTTCCCCCACCCTTCCATCT
CATCTCTGAAAGGCACTTCCCACTGGCCAGCCCCGACTGGTGCTGGAGGG
CAAGAGAGCCTATGAGCCATGTGTGGCTGTCAGCCCCTTGGTGGAGAGCC
ACAGACAGGATGGAGAGTGGCTGGCAGGGCCCCGTGGGGATGAACAGCTT
GGATTGGGGCGACTGGGCTTCATCCAGGCTGGGCTGGATGTGTGCATACA
TTTCAGTGACCCGTTTTAGAAACAGAATTAATATGGTGAATAGAGAAAGA
AGAAATCAGTGACTTTCGCTCCTCCATACAATTCAATTTGGCTTAAGTTA
GCCAAAGCCATACCAAGTCCTCTCTCTATGTCTCAGCTGCTGCCAGGCTT
GTGGTGGCCACACAGCTGGCTAGACTGTCATCTCTGTCCTCAAGGGGCTC
AAGCTAGAGGAGGAGAGTTGAGAAACCAAATCACTATACACAAAGTAGAA
GGTGGAACACACCCAGGAGCATGTCAACGGGGTGCTGTGGGACTTCAGAG
TAGGCAGATCGTCACCAAGCTTCAACGGCAAAGATGCCACTGGGGGAAAG
AAGGACCAAGCTTGGAAGACAGAGTAAGTCTGGAGGCAAGATCTTGTCTC
ACCAGCAGGGGCCAGGTCCATGGTGACACCTTCCCCAGGCAGTCACCTCT
CTGAGCCCACTTTATATCCTAGGCCTGGATTCAAAGACACTTGAGCCCTG
CTCCAGCCTTCCTTTGAGGTGCTATCTTGGTGCCTTTCCTATAATCACTG
CTCCAGTCCCATGTCATCTGGTCCCCAGTTACCACATCAAGCTTCCCGAA
GCTCCACACAGACCATGCCACATCTTTACCAAAAAATCAGCAGTGGGTCC
CCTCACCTCCAGGACAAAGCTCCAGCTCTTCGACCTGCCTGTCAATATTT
GCAATCACTGCCTGCACAAATTAGCTGGGTGTTGTCATGAAAGGATCACT
TGAGCCCAGGAGTTCCAGGCTGCAATGACCTATGATTGAACCACTGCACT
CTGGCCTGGGTGACAGAGTGGATCTAAACTAAAAATAAAAAGATTTACAG
TCAAGCCTCAAAGGCTTTTCCCATACCTTCTTCCACCATCACCTCCCTGA
GCCCTCTCTTTCCTCCGAAGCCTCCTCGCACATCCCTACCACCTTTGCAC
ACCTCAGAATGGGGACACCTCTCCCCTTTCCTCTCCATCTAACTTATGGT
TTTCAAACTTGAGCGTGATCAGTTACCTGGAGATTTGTGAAAACCCAGAT
GACTAGACCCACCCCCAGTTTCTGATTCAGCAGGTCTGGGGTGGGGCCGA
GGATCTGCATTTCTAACAAGTTCCCAGGTCATGTTGCCGCTGCTACTGAT
CCAGGACTTTGGGAATCGCTCCTCTAATCTACAGCTGTCCATTCCCCATG
GTCCATTCAGAGCCTCTCTGCCCTGCCCCCACCACCCCCAGTCTCGCCTG
TCTGCCAAGCGCACAGGAAACTCTCCTTCATCCAAACCCTGGACCAACGC
CTTCTGCTTGGCCCACTCAGAGGCCTTGTAGGGTTGGTCTGATATTGGAC
AGAGAAATGGCCCTCTGCTCTTTCTCCCCTGACCTCTCTGAAGGGGGCCT
GCCCCTCCACACCTGTGGGTATTTCTCGCAAGGTGGAGACAAGAGACTGA
GAAAAGAAATAAGACACAGAGAAAGTATAGAGGAATAAAAGTGGGCCCAG
GGGACCGGCGCTCAGCAAGTGAGGACCTGCACCGGTGCTGGTCTCTGAGT
TCCCTCAGTATTTATTGATCACTATCTTTACTATCTCCGCGAGGGGAATG
TGGTGGGGCTATAGGGTGAAGGTGAGGAGAGGGTCAGCAGAAAAACATAT
GAGCAAAGACTCTGTGTCATAAATAAGTTTAAGGAAAGGTGCTGTGCCTG
GATGTGCTAGATTTATGTTTAACTTTACACAAACATCTCAGTGTAGTAAA
GAGTAACAGAGCAGTATTGCCGCCATGATGTCTCGCCTCCAGACATAAGG
CAGTTTTCTCCTCTCTCAAAATAGAATGTATGATCGGTTTTACACCGGGT
CATTCCATTCCCAGGGACGAGCAGGAGACAGATGCCTTCCTCTTATCTCA
ACCGAATAGAGGCCTTCCTCCTTCACTAATCCTCCTCAGCACAGACCCTT
TACGGGTGTCGGGCTGGGGGGCTGTAAGGTCTTTCCCTTCCCATGAGGCC
ATATCTCAGGCTGTCTCAGTGGGGGGAAACCTGGACAATACCTAGGCTTT
CTCGGGCAGGGGTTCCTGCGGCCTTCCACAGTGTATTGTGTCTCTGGTTA
ATAGAGAACGGAGAATGGTGATGACTTTCACCAAGCACACTGCCTGCAAG
AACTTTTCTTTTTTTTTTTTTTTGAGACAGAGTCTTGCTCTGTCGCCCAG
GCTGGAGTGCAGTGGCGCGATCTCGGCTCACTGCCACCTCTGCCTCCCGG
GTTCACGCCATTCTCCTGCCTCAGCCTCCCGAGTAGCTGGGACTACAGGC
GCCCGCCACCACGCCCGGCTAATTTTTTTGTATTTTTTTAGTAGAGATGG
GGTTTCACCGTGTTCACCAGGATGGTCTCGATCTCCTGACCTCATGATCC
GCCCGCCTTGGCCTCCCAAAATGCTGGGATTACACGTGTGAGGCAAGAAC
TTTTTAAAAGTGCATCTTGCGCAGCCCTAGATCCATTAAACCTTGATTCA
ATACAGGACATGTTTTTGTGAGCACAGGGTTGGGACAAAAGTTACAGATT
AACAGCATCTCAAAGCAGAACAATTTTTCTTAGTACAGATCAAAATGGAG
TTTCTTATGTCTTCCTTTTTCTACATAGACACAGTAACAATCTGATCTCT
CTTTCTTTTCCCCATACCTCTCACGCTGTATCAGGCCCCAATTCTTGGGA
ACGTCACCTTAGAACTGTCCCACACATTTCTACAGCCACTTGGCTCAGGC
CCTTTGCTGACCAGGATGGTTGCAGTTCTGCCTTTGGTGCCTCGCCTCCT
CCAGTTCTTTCACTCAGCAGCTGCAGGGGTCCACGTGGCAAATCTAATAA
TCTTCTTCTCTATAGAAAATCCTCTGCTGGCTCTCTAGTGCCCAGGATCC
AGTCCCAGCATCTCAGCACGGCCTTCAAGCATTTCCACGTCCTGGCCTGG
CTCCATGGTCTCCCCGCCAATTTGCCACCTTCTCCATGCATCCTTTTCTG
ATCCCCTCCTCACTCATCCCAGCAAAGAACCCCCTCCTGGCCTGAGCATA
GCATTTCGTGGTGTGTATCTCAGAGCATCCAGTTAGGGGTGTGCAAGTTT
ACTTTGTTACTGGCTGATGTTGTGAAGTCCCAAGTTGTTGGTGCCGCAAA
CAAAAAATTGGACATGACACACACAAATAGCAAAGCAGCAAAAGTTTATT
AAGCACAGTACGATCCACTATGGATCAAGGATGACCTGCGAATGGTATCA
GCATCACTTTGCTATATTTCATGGCCTTTTCTATGTGTTTTTTTTCTCTT
TTTCCTCAAGCTGCCTAAGCTTTAGCCAGCATGTGCCTTTTGGTTGACAG
GTGGGTTGCTTAGTTTCTTGGCCTCTGTGTGTTTACGTGTCATTTCCTTC
CCATAGTTTTAAGTACATGCATGATATGCACTCTGTAGGCATGAACCTTA
AGTAGCTAATTACTATACGGGGTCATTTTGAGGATATCTTTTCTCTGTAG
TACATGTGCATCTTTTTTTGCAGTGGTGCAATCTTGGCTCACTGCAACCT
CCTCCTCCCTGGTTCAAGTGATTCTCCTGCCTCAGCTTCCTAAGCACCTG
AGACTACAGGTGCATGCCACCACGCCCGGCTAATTTTTGTATTTTTAGTA
GAGATGGGGTTTCACCATGTTGGCCAGGCTGATCTCGAACTCCTGACCGC
AAGTGATCCACCCACCTCGGCCTCCCAAAGCACTGGGATTACAGGCATGA
GCCACCGCACCCAGCCTAGTATATGCCCATCTCTTAGGAGCTGCTCCTAA
CTGGTTTGGTTTGGATCTAGCCAGCCATGGGGCTCCTTATTCACTTATTT
ATCTTCTGTTTTTGCTCACCTGCCTCTTTCTCTTGCTTCTGCTCCTACTC
ATTCCTTCCTTAATCCAACCTCCAATTCCCTCTGCTATTCTCCTGCCTCA
AGTTCACTAGGCTGGCTGCAAGGGTCCTGAGGGAGAGGTTGTGTATCGCC
CCTGTATACTCCAGGTCCAGTAAATGTTTGCTGACTAATGATTGGCATTT
CCCTCAGGCCCTGCCATTTCTGTGGGCTCAGGTCCCTACTGGCTCAGGCC
CCTGCCTCCCTCGGCAAGGCCACAATG

[0391] 23) WNT1 WNT1 (wingless-type MMTV integration site family, member 1) is a member of the WNT protein family of secreted molecules that are involved in intercellular signaling during development. WNT proteins have been shown to have regulatory roles in the cell fate process and have been associated with tumorigenesis. WNT proteins stimulate either the canonical or non-canonical intracellular signal transduction cascades. WNT proteins bind to the extracellular Frizzled (Fz) receptor family. Binding of WNT to the Fz and low density lipoprotein related protein 5/6 receptor complex, disrupts downstream protein complexes which inhibits the destruction of β-catenin. β-catenin enters the nucleus and complexes with TCF to initiate WNT-related gene expression. WNT1 has been associated multiple cancers including hepatitis B virus-related and hepatitis C virus-related hepatocellular carcinoma, gastric cancer, pancreatic cancer, breast cancer, and lung cancer.

[0392] Protein: Wnt-1 Gene: WNT1 (Homo sapiens, chromosome 12, 49372236-49376396 [NCBI Reference Sequence: NC_{—}000012.11]; start site location: 49372434; strand: positive)

Gene Identification

| | |
|---|---|
| GeneID | 7471 |
| HGNC | 12774 |
| HPRD | 01276 |
| MIM | 164820 |

Targeted Sequences

| | | Relative |
|---|---|---|
| | | upstream |
| | | location |
| | | to gene |
| Sequence | | start |
| ID No: | Sequence (5′-3′) | site |
| 6466 | CGCGCGCCCGCCTCACTCAGCTGAGCG | 442 |
| 6537 | CGTCATTCTGTTGCCCTTTGTACCTCG | 1226 |
| 6545 | CGCCACGGGCGCATCCATCCCTCCTGGG | 4454 |
| 6579 | CACCGCCCTCTAGCCGCCTGCGGG | 4960 |
| 6580 | TTGCGGCGACTTTGGTTGTTGCCCGCGACGGT | 34 |

Target Shift Sequences

| | | Relative |
|---|---|---|
| | | upstream |
| | | location |
| | | to gene |
| Sequence | | start |
| ID No: | Sequence (5′-3′) | site |
| 6466 | CGCGCGCCCGCCTCACTCAGCTGAGCG | 442 |
| 6467 | GCGCGCCCGCCTCACTCAGC | 443 |
| 6468 | CGCGCCCGCCTCACTCAGCT | 444 |
| 6469 | GCGCCCGCCTCACTCAGCTG | 445 |
| 6470 | CGCCCGCCTCACTCAGCTGA | 446 |
| 6471 | GCCCGCCTCACTCAGCTGAG | 447 |
| 6472 | CCCGCCTCACTCAGCTGAGC | 448 |
| 6473 | CCGCCTCACTCAGCTGAGCG | 449 |
| 6474 | CGCCTCACTCAGCTGAGCGT | 450 |
| 6475 | GCCTCACTCAGCTGAGCGTC | 451 |
| 6476 | CCTCACTCAGCTGAGCGTCC | 452 |
| 6477 | CTCACTCAGCTGAGCGTCCG | 453 |
| 6478 | TCACTCAGCTGAGCGTCCGG | 454 |
| 6479 | CACTCAGCTGAGCGTCCGGA | 455 |
| 6480 | ACTCAGCTGAGCGTCCGGAG | 456 |
| 6481 | CTCAGCTGAGCGTCCGGAGC | 457 |
| 6482 | TCAGCTGAGCGTCCGGAGCC | 458 |
| 6483 | CAGCTGAGCGTCCGGAGCCC | 459 |
| 6484 | AGCTGAGCGTCCGGAGCCCG | 460 |
| 6485 | GCTGAGCGTCCGGAGCCCGT | 461 |
| 6486 | CTGAGCGTCCGGAGCCCGTC | 462 |
| 6487 | TGAGCGTCCGGAGCCCGTCG | 463 |
| 6488 | GAGCGTCCGGAGCCCGTCGA | 464 |
| 6489 | AGCGTCCGGAGCCCGTCGAG | 465 |
| 6490 | GCGTCCGGAGCCCGTCGAGG | 466 |
| 6491 | CGTCCGGAGCCCGTCGAGGA | 467 |
| 6492 | GTCCGGAGCCCGTCGAGGAC | 468 |
| 6493 | TCCGGAGCCCGTCGAGGACT | 469 |
| 6494 | CCGGAGCCCGTCGAGGACTA | 470 |
| 6495 | CGGAGCCCGTCGAGGACTAG | 471 |
| 6496 | GGAGCCCGTCGAGGACTAGC | 472 |
| 6497 | GAGCCCGTCGAGGACTAGCA | 473 |
| 6498 | AGCCCGTCGAGGACTAGCAT | 474 |
| 6499 | GCCCGTCGAGGACTAGCATC | 475 |
| 6500 | CCCGTCGAGGACTAGCATCC | 476 |
| 6501 | CCGTCGAGGACTAGCATCCG | 477 |
| 6502 | CGTCGAGGACTAGCATCCGC | 478 |
| 6503 | GTCGAGGACTAGCATCCGCC | 479 |
| 6504 | TCGAGGACTAGCATCCGCCA | 480 |
| 6505 | CGAGGACTAGCATCCGCCAG | 481 |
| 6506 | GAGGACTAGCATCCGCCAGG | 482 |
| 6507 | AGGACTAGCATCCGCCAGGG | 483 |
| 6508 | GGACTAGCATCCGCCAGGGG | 484 |
| 6509 | GACTAGCATCCGCCAGGGGG | 485 |
| 6510 | ACTAGCATCCGCCAGGGGGC | 486 |
| 6511 | CTAGCATCCGCCAGGGGGCG | 487 |
| 6512 | TAGCATCCGCCAGGGGGCGC | 488 |
| 6513 | AGCATCCGCCAGGGGGCGCG | 489 |
| 6514 | GCATCCGCCAGGGGGCGCGG | 490 |
| 6515 | CATCCGCCAGGGGGCGCGGC | 491 |
| 6516 | ATCCGCCAGGGGGCGCGGCG | 492 |
| 6517 | TCCGCCAGGGGGCGCGGCGA | 493 |
| 6518 | CCGCCAGGGGGCGCGGCGAG | 494 |
| 6519 | ACGCGCGCCCGCCTCACTCA | 441 |
| 6520 | CACGCGCGCCCGCCTCACTC | 440 |
| 6521 | CCACGCGCGCCCGCCTCACT | 439 |
| 6522 | CCCACGCGCGCCCGCCTCAC | 438 |
| 6523 | TCCCACGCGCGCCCGCCTCA | 437 |
| 6524 | CTCCCACGCGCGCCCGCCTC | 436 |
| 6525 | CCTCCCACGCGCGCCCGCCT | 435 |
| 6526 | CCCTCCCACGCGCGCCCGCC | 434 |
| 6527 | ACCCTCCCACGCGCGCCCGC | 433 |
| 6528 | CACCCTCCCACGCGCGCCCG | 432 |
| 6529 | ACACCCTCCCACGCGCGCCC | 431 |
| 6530 | GACACCCTCCCACGCGCGCC | 430 |
| 6531 | GGACACCCTCCCACGCGCGC | 429 |
| 6532 | GGGACACCCTCCCACGCGCG | 428 |
| 6533 | TGGGACACCCTCCCACGCGC | 427 |
| 6534 | TTGGGACACCCTCCCACGCG | 426 |
| 6535 | CTTGGGACACCCTCCCACGC | 425 |
| 6536 | CCTTGGGACACCCTCCCACG | 424 |
| 6537 | CGTCATTCTGTTGCCCTTTGTACCTCG | 1226 |
| 6538 | GCGTCATTCTGTTGCCCTTT | 1225 |
| 6539 | TGCGTCATTCTGTTGCCCTT | 1224 |
| 6540 | ATGCGTCATTCTGTTGCCCT | 1223 |
| 6541 | TATGCGTCATTCTGTTGCCC | 1222 |
| 6542 | GTATGCGTCATTCTGTTGCC | 1221 |
| 6543 | TGTATGCGTCATTCTGTTGC | 1220 |
| 6544 | GTGTATGCGTCATTCTGTTG | 1219 |
| 6545 | CGCCACGGGCGCATCCATCCCTCCTGGG | 4454 |
| 6546 | GCCACGGGCGCATCCATCCC | 4455 |
| 6547 | CCACGGGCGCATCCATCCCT | 4456 |
| 6548 | CACGGGCGCATCCATCCCTC | 4457 |
| 6549 | ACGGGCGCATCCATCCCTCC | 4458 |
| 6550 | CGGGCGCATCCATCCCTCCT | 4459 |
| 6551 | GGGCGCATCCATCCCTCCTG | 4460 |
| 6552 | GGCGCATCCATCCCTCCTGG | 4461 |
| 6553 | GCGCATCCATCCCTCCTGGG | 4462 |
| 6554 | CGCATCCATCCCTCCTGGGC | 4463 |
| 6555 | CCGCCACGGGCGCATCCATC | 4453 |
| 6556 | ACCGCCACGGGCGCATCCAT | 4452 |
| 6557 | CACCGCCACGGGCGCATCCA | 4451 |
| 6558 | TCACCGCCACGGGCGCATCC | 4450 |
| 6559 | CTCACCGCCACGGGCGCATC | 4449 |
| 6560 | GCTCACCGCCACGGGCGCAT | 4448 |
| 6561 | AGCTCACCGCCACGGGCGCA | 4447 |
| 6562 | GAGCTCACCGCCACGGGCGC | 4446 |
| 6563 | TGAGCTCACCGCCACGGGCG | 4445 |
| 6564 | CTGAGCTCACCGCCACGGGC | 4444 |
| 6565 | GCTGAGCTCACCGCCACGGG | 4443 |
| 6566 | AGCTGAGCTCACCGCCACGG | 4442 |
| 6567 | CAGCTGAGCTCACCGCCACG | 4441 |
| 6568 | GCAGCTGAGCTCACCGCCAC | 4440 |
| 6569 | CGCAGCTGAGCTCACCGCCA | 4439 |
| 6570 | GCGCAGCTGAGCTCACCGCC | 4438 |
| 6571 | AGCGCAGCTGAGCTCACCGC | 4437 |
| 6572 | CAGCGCAGCTGAGCTCACCG | 4436 |
| 6573 | GCAGCGCAGCTGAGCTCACC | 4435 |
| 6574 | GGCAGCGCAGCTGAGCTCAC | 4434 |
| 6575 | GGGCAGCGCAGCTGAGCTCA | 4433 |
| 6576 | TGGGCAGCGCAGCTGAGCTC | 4432 |
| 6577 | GTGGGCAGCGCAGCTGAGCT | 4431 |
| 6578 | GGTGGGCAGCGCAGCTGAGC | 4430 |
| 6579 | CACCGCCCTCTAGCCGCCTGCGGG | 0 |
| 6580 | TTGCGGCGACTTTGGTTGTTGCCCGCGACGGT | 34 |
| 6581 | TGCGGCGACTTTGGTTGTTG | 35 |
| 6582 | GCGGCGACTTTGGTTGTTGC | 36 |
| 6583 | CGGCGACTTTGGTTGTTGCC | 37 |
| 6584 | GGCGACTTTGGTTGTTGCCC | 38 |
| 6585 | GCGACTTTGGTTGTTGCCCG | 39 |
| 6586 | CGACTTTGGTTGTTGCCCGC | 40 |
| 6587 | GACTTTGGTTGTTGCCCGCG | 41 |
| 6588 | ACTTTGGTTGTTGCCCGCGA | 42 |
| 6589 | CTTTGGTTGTTGCCCGCGAC | 43 |
| 6590 | TTTGGTTGTTGCCCGCGACG | 44 |
| 6591 | TTGGTTGTTGCCCGCGACGG | 45 |
| 6592 | TGGTTGTTGCCCGCGACGGT | 46 |
| 6593 | GGTTGTTGCCCGCGACGGTG | 47 |
| 6594 | GTTGTTGCCCGCGACGGTGG | 48 |
| 6595 | TTGTTGCCCGCGACGGTGGG | 49 |
| 6596 | TGTTGCCCGCGACGGTGGGA | 50 |
| 6597 | GTTGCCCGCGACGGTGGGAC | 51 |
| 6598 | TTGCCCGCGACGGTGGGACG | 52 |
| 6599 | TGCCCGCGACGGTGGGACGG | 53 |
| 6600 | GCCCGCGACGGTGGGACGGG | 54 |
| 6601 | CCCGCGACGGTGGGACGGGA | 55 |
| 6602 | CCGCGACGGTGGGACGGGAC | 56 |
| 6603 | GTTGCGGCGACTTTGGTTGT | 33 |
| 6604 | AGTTGCGGCGACTTTGGTTG | 32 |
| 6605 | CAGTTGCGGCGACTTTGGTT | 31 |
| 6606 | GCAGTTGCGGCGACTTTGGT | 30 |
| 6607 | TGCAGTTGCGGCGACTTTGG | 29 |
| 6608 | CTGCAGTTGCGGCGACTTTG | 28 |
| 6609 | GCTGCAGTTGCGGCGACTTT | 27 |
| 6610 | TGCTGCAGTTGCGGCGACTT | 26 |
| 6611 | GTGCTGCAGTTGCGGCGACT | 25 |
| 6612 | TGTGCTGCAGTTGCGGCGAC | 24 |
| 6613 | CTGTGCTGCAGTTGCGGCGA | 23 |
| 6614 | TCTGTGCTGCAGTTGCGGCG | 22 |
| 6615 | CTCTGTGCTGCAGTTGCGGC | 21 |
| 6616 | GCTCTGTGCTGCAGTTGCGG | 20 |
| 6617 | CGCTCTGTGCTGCAGTTGCG | 19 |
| 6618 | CCGCTCTGTGCTGCAGTTGC | 18 |
| 6619 | CCCGCTCTGTGCTGCAGTTG | 17 |
| 6620 | GCCCGCTCTGTGCTGCAGTT | 16 |
| 6621 | TGCCCGCTCTGTGCTGCAGT | 15 |
| 6622 | TTGCCCGCTCTGTGCTGCAG | 14 |
| 6623 | TTTGCCCGCTCTGTGCTGCA | 13 |
| 6624 | CTTTGCCCGCTCTGTGCTGC | 12 |
| 6625 | GCTTTGCCCGCTCTGTGCTG | 11 |
| 6626 | GGCTTTGCCCGCTCTGTGCT | 10 |
| 6627 | TGGCTTTGCCCGCTCTGTGC | 9 |
| 6628 | CTGGCTTTGCCCGCTCTGTG | 8 |
| 6629 | CCTGGCTTTGCCCGCTCTGT | 7 |
| 6630 | GCCTGGCTTTGCCCGCTCTG | 6 |
| 6631 | TGCCTGGCTTTGCCCGCTCT | 5 |
| 6632 | CTGCCTGGCTTTGCCCGCTC | 4 |
| 6633 | CCTGCCTGGCTTTGCCCGCT | 3 |
| 6634 | GCCTGCCTGGCTTTGCCCGC | 2 |
| 6635 | GGCCTGCCTGGCTTTGCCCG | 1 |

Hot Zones (Relative upstream location to gene start site)
1-1000
1050-1450
1600-1900
3300-3800
4250-4700
4750-5000

### Examples

[0393] In FIG. 42, In MCF7 (human mammary breast cell line), WNT1_{—}1, WNT1_{—}2, WNT1_{—}3 produced statistically significant (P<0.05) inhibition at 10 μM compared to the untreated control values. The WNT1 sequences WNT1_{—}1, WNT1_{—}2, and WNT1_{—}3 fit the independent and dependent DNAi motif claims.

[0394] The secondary structures for WNT1_{—}1, WNT1_{—}2, and WNT1_{—}3 are shown in FIG. 43, FIG. 44, and FIG. 45.

Genetic Code (5′ Upstream Region)

(SEQ ID NO: 11972)

CCCGGGGAACCCAAATTATAGGCCCAGGAGGGATGGATGCGCCCGTGGCG
GTGAGCTCAGCTGCGCTGCCCACCCTCCGCTTAATGCGCCTTCTGCTGCA
GCACCGTAGGCCACCACCTGGAGGCACCAAAGGGTCTGCGGGCCGACTGC
ATACTGGACTCTCAGGAAGGCCCCACTTTCAGCAGTCCACTCCAACAAAT
CCATGGGATTACCTTAGACAGAATTTTGCCCCCTTCTGTACTCAGGCCTA
ATGGATGGGCTGTGCCTTCCCAGCCCAAGGGGGCAGTGCTGCCTGCGGGT
GCTTCAAAGGAGGGTAGGCTCCTCTGCCCACAAACTCTAAACCCTGGAGC
CCTGCTTCCTCCCCAGATCCCAAAGTCAAGGCAAAGCCCCTCTCCCCTCT
AACATCTCACCTCTAACCCTATTCCAGGGGGGTGGTTTGCTACTGATTTT
CAACTTCAAGCCTTTAAAGTCATCCACGGTCAAAACTGATACAGAGAAAA
ATGAAGCAGGGTAAAGGAGATTAGTAGTGGGATTCTATTTTATAAAGGGG
GAGGGAAAACAAACTGAAGGAACAAATACATGGAGAGATCTGAGGAAGAG
CATTTTAGAAGACAGAAAAGCAGGTGCACAGACCCTTAGAAAGGAGCATG
CTTGGTTCAAAGGATTAGAAAAGAGGCCAGTGAGGCTAGTGGGGAGAAAT
TCGCAAGGAAGAGAGTGGTAGGCAATGAAGCTGGAGGGCTAGGAAGGAGG
CCCCTTTACTTTGAGTGACATGGGGTCTCGCTGGAAAATTTTGAGCAGAG
AAATGAACTAATCAGACTTCTGTTTTAGGAAAGATGGCTCTGGGCTGGGC
GCAGTGGCTCATGCCTGTAATCCCAGTACTTTGGGAGGCCGACGTGGGCA
GATCACGAGGTCAGGAGTTCGAGACCAGCCTGGCCAACATGGTGAAACCC
CACCTCTACTAAAAATACAAAAATTAGGTGGGAGTGTTGGTGGGCGCCTG
TAATCCCAGCTACTCGGTACGCTGAGGCAGGAGAATCGCTTGAAACCGGA
AGGTGGAGGTTACAGTGAGCCGAGATCATACCACTGCACTCCAGTCTGCA
CAACAAGAGCAAAACTCCGTCTCAAAAAAAAAAAAAAAGAAAGAAAGAAA
GAAAGAAATTGGCTCTAGTAATTAAATCAACCCTTTTGATTTTTGCAGTA
AAATGGAGCACTGAAATGGAGCAATCTTGGGCAGTAATGTGGGGTCTAAT
GAAGTTTTTGGGTTTTTCAGATGGGTACTATTGCAGCATGTCTGCATGCT
TATGTGTATGTTCCAGGAGAGAGATAAGTGGATGATGCAGGAAAGAAAGA
GGGGACAGTTGATATCATGATTATTTGATCTAAATAGAAAGTTGGGTGCT
TGTTTTGGCAGCACATATACTAAAATTGGAATGATATAGAGATTAGCATG
GCCCCTGCACAAGGATGACATGCAAATTTGTGAAGCATTTCATATTTTGA
AAAAGAAATGTCAGCCAGGTCATAAACAGTGTGACCCAGATCTAGGGGCC
TTACCCTCTTGCCCCCTACTCCTGGTGTGTGGAATGTTGGAACAAAGCAC
AGTGGCTCCTTTCCTCTCTTCCCACCTCTGCTTGACAACAGTCGTCAAAG
ACAGGGCTTCCATATTTTCCAGCCAGCCTCCCACCCTCACGGTGTTGTAT
CAATCCACCAGGCCAAAAGATGTGACCCAGGCCCCAGTGGGAAGAAACTC
ATAAGGGATAAAGGACAGGCTCCCCGTGATACATTGTCCATTTACTTGAG
CTATCTATGCTGGGTGCTCTCTGCAGGGACTACTGGCTTTTGGATCTACG
GAGGGTGCTGGACCACTACACCTTTTCCCTCTGGGGTGGATCCTTGGAAG
GGCCAGATATACTAGGCTGGGCAAAAGGGAAGAAAAAAGGGAAAGAAGGA
CATTTCTTTCTAAAATAACTTCCATCAGGCTTCATTTGGGTTAATATGCA
TCTCATTTAAAACACAAGTGCCCGGGAATATTAATGAAACTTACCTGGCA
TTTATTCCTTAGAGTGATTTCCCTGCCTTAGAAGGGAATCCTAGTCATTT
CTGGGACTTGAGACTTTAGGTTCAGGCCTGGGGAAATTTCTCAGTCAGAA
GGCATCCTAAAAGACAAGGGAGATGAAAAAAATGAGAGCTAGAACTCAAA
AGGGAGGCAGAAAGGCCCAAAAAATTATTTTTACCCATCAATTTTGAGAA
GGGTTCCCAGCCTGTAATTGCTGCACACTGGCAAGCAGCTGGTAAGGTCG
AAAGAGCATGGGCTTTGAGTCAAATTGGTCTGGGTTTTAATCTGGCTCTA
CCATTGATTCATTTATTAGACGTGGACCTTGGACAAGTGCCTGATCTATT
TTTAATTCTGCAAAATGGGGAGAGAGAAGAGATCTTCCCTCCTTCCAGGG
GCCATGTGTGTGGTGGTGGGGCATGATAACCAGGCTGGCAGTGCCCCCTA
TTCCCCATATAGGGAAAAGCAGCCACTTTTTTTTTTTTTTTCAGATGAAG
TCTTGCTCTGTAGCCCAGACTGGAGTGCAATGGCGTGATCTCGGCTCACT
GCAATCTCCACCTCCCGGGTTCAAGCCATTCTCCTGCCTCAGCCTCCTGA
GTAGCTGGGACTACAGGTGTGCGCCACCACACTCAGCTAATTTTTGTATT
TTTATTAGAGATGGGATTCCACTATGTTGGCCAGGATGGTCTCGATCTCC
TGACCTCATGATCCACCTGCCTCGGCCTCCCAAAGTGCGGGGATTATAGG
CATGAGCCACCGCGCCCAGCCTGTCACTTCTTCAATAGGAGGCCTAAATG
GCCTTGAAGCTGAGTAGGAGTCCCTGGGAGAGAAGAGAAAAGTGTACAAT
GGATGAGATGGTCACAGGCACTCTGGGTATCCCAGTGTGGTGGGAACTAG
AGCTTTAGGGAAAGACAGAAACTTGGCAGAAACATCCAAAGAGAAGCAAA
CACATGGAGGCACAAGTTTCCTCATCTAGGTTCAATGTAGCCAGCAACCC
TTGTCTTCCCAGTCCTCTCCATCACCATACATACAGTGGACATCCGCACC
ATTTCCCATCCTTTCTGAGCCTAGGCCTCAGAGACTTAGCCACTCCAGGC
TGGGTTCACCTCAATACCATCTTGGTTGTAGGCTCGGCTCTCTCCCCCAA
TGACATGCACTGGTTGACACATACCACAGTGTGACACGCCATAGGATGCC
ACGAGGTACAAAGGGCAACAGAATGACGCATACACACATATTTAATCTTC
CCATGCACATGCTCATCCACCCACTCCACACACAGTCCAGACACTCTGCA
TCCCTCAATCATGCTTCTGAGTCTCCTGTCGACAGTTGCCACCTCCTTCC
TGACACACTGCCCCAGGCGGTGACTGTGACAAGGTGACTCCATGACCTTT
TCTGACTTGAGCTAAATTCCAAAATTCTTTGGAAAGTTTCCTAACATCCT
TCGTCAGAACAAGGAGTTTCTGCACGTACCAACACACAGGAGGATGCACC
CTCAGAACACAGCACATTCTCACTCCCACCCATATTCACGTTGTTCCACT
TCACACACACACACACACACACACACACACACAGCCACTTGTGCGCTTCT
TCTGGCGCACATGAGCAAACTGCCTGTTGCTTTAGGTTTCTCTCCACCGC
TAGGCTCCTTTTGGTTAGCTCACCCCCACAACTCATCCCCGGGATTTCCC
TGACCACAGCCGCACTCACGCCCCCGTCTCCCCTTTTTCCTTCTCTGTCC
AGCCATCGGGGGTTCCTGGGCGGTTAAGCATCTCCCCGGAGTCGCTGCCC
AGAACCACAGCTTTCCTTCCGACACTCAGGATGGGGGAGAGAGGGGACGT
CGGAGGGGCCCGGGGTGACGTCGAGGGGACAACCCCACCGCGGGCGGCGA
GGCGGGCTGGGCCCCTGGCGGGCTCTCCCCGCAGCACACTCTCGCCGCGC
CCCCTGGCGGATGCTAGTCCTCGACGGGCTCCGGACGCTCAGCTGAGTGA
GGCGGGCGCGCGTGGGAGGGTGTCCCAAGGGGAGGGGTCCGCGGCCAGTG
CAGGCCCGGAGGCGGGGGCCACCGGGCAGGGGGCGGGGGTGAGCCCCGAC
GGCCAACCCGTCAGCTCTCGGCTCAGACGGGCGGGAACCACAGCCCCGCT
CGCTGCCCATTGTCTGCGCCCCTAACCGGTGCGCCCTGGTGCCACAGTGC
GGCCCGGAGGGGCAGCCTCCTCCCGTCACTTCAGCCAGCGCCGCAACTAT
AAGAGGCGGTGCCGCCCGCCGTGGCCGCCTCAGCCCACCAGCCGGGACCG
CGAGCCATGCTGTCCGCCGCCCGCCCCCAGGGTTGTTAAAGCCAGACTGC
GAACTCTCGCCACTGCCGCCACCGCCGCGTCCCGTCCCACCGTCGCGGGC
AACAACCAAAGTCGCCGCAACTGCAGCACAGAGCGGGCAAAGCCAGGCAG
GCCATG

[0395] 24) Clusterin. Clusterin is a heterodimeric glycoprotein produced by a wide array of tissues and found in most biologic fluids. A number of physiologic functions have been proposed for clusterin based on its distribution and in vitro properties. These include complement regulation, lipid transport, sperm maturation, initiation of apoptosis, endocrine secretion, membrane protection, and promotion of cell interactions. A prominent and defining feature of clusterin is its induction in such disease states as glomerulonephritis, polycystic kidney disease, renal tubular injury, neurodegenerative conditions including Alzheimer's disease, atherosclerosis, and myocardial infarction (reviewed by Rosenberg and Silkensen, Int. J. Biochem Cell Biol. 1995: 27 (7) 633-645. Genome-wide association studies found a statistical association between a SNP within the clusterin gene and the risk of having Alzheimer's disease (Lambert et al., 2009: Nat. Genet. 41 (10): 1094-1099). Other studies, Alzheimer's patients have more clusterin in their blood (Schrijvers et al. 2011 JAMA 305 (13): 1322-1326).

[0396] Clusterin acts as cell-survival protein and is over-expressed in response to anti-cancer agents. An antisense approach to inhibiting clusterin (Curtisen) has shown promising results in combination with currently available chemotherapies in several tumor types. The FDA granted Custirsen two Fast Track Designations as a treatment in combination with first-line and second-line docetaxel for progressive metastatic prostate cancer.

[0397] Protein: Clusterin Gene: CLU (Homo sapiens, chromosome 8, 27454434-27472328 [NCBI Reference Sequence: NC_{—}000008.10]; start site location: 27468088; strand: negative)

Gene Identification

| | |
|---|---|
| GeneID | 1191 |
| HGNC | 2095 |
| HPRD | — |
| MIM | 185430 |

Targeted Sequences

| | | Relative |
|---|---|---|
| | | upstream |
| | | location |
| Sequence | | to gene |
| ID No: | Sequence (5′-3′) | start site |
| 6636 | CGTCCCGCCCACCTGCTGCCTGCAGCAG | 78 |
| 6660 | CGACAATCAGCGAGGCACACAGGCT | 330 |
| 6689 | CGGAGAGTAGAGAGGGTTCGCAGTGGCCC | 718 |
| 6690 | CCACGGGGCACAGGCCATAGCCCCG | 890 |
| 6709 | CTCGTGCTCTCAGGCGGCGGTTGCGCCG | 3865 |
| 6752 | CCGGGAGGTGGGGGCCGGTGCAGCACCGG | 4260 |
| 6753 | TCGCGTGCCCATCTGGGAGCCCCTCTCACG | 4395 |

Target Shift Sequences

| | | Relative |
|---|---|---|
| | | upstream |
| | | location |
| Sequence | | to gene |
| ID No: | Sequence (5′-3′) | start site |
| 6636 | CGTCCCGCCCACCTGCTGCCTGCAGCAG | 78 |
| 6637 | GTCCCGCCCACCTGCTGCCT | 79 |
| 6638 | TCCCGCCCACCTGCTGCCTG | 80 |
| 6639 | CCCGCCCACCTGCTGCCTGC | 81 |
| 6640 | CCGCCCACCTGCTGCCTGCA | 82 |
| 6641 | CGCCCACCTGCTGCCTGCAG | 83 |
| 6642 | GCGTCCCGCCCACCTGCTGC | 77 |
| 6643 | GGCGTCCCGCCCACCTGCTG | 76 |
| 6644 | TGGCGTCCCGCCCACCTGCT | 75 |
| 6645 | CTGGCGTCCCGCCCACCTGC | 74 |
| 6646 | GCTGGCGTCCCGCCCACCTG | 73 |
| 6647 | TGCTGGCGTCCCGCCCACCT | 72 |
| 6648 | CTGCTGGCGTCCCGCCCACC | 71 |
| 6649 | CCTGCTGGCGTCCCGCCCAC | 70 |
| 6650 | GCCTGCTGGCGTCCCGCCCA | 69 |
| 6651 | AGCCTGCTGGCGTCCCGCCC | 68 |
| 6652 | CAGCCTGCTGGCGTCCCGCC | 67 |
| 6653 | ACAGCCTGCTGGCGTCCCGC | 66 |
| 6654 | GACAGCCTGCTGGCGTCCCG | 65 |
| 6655 | AGACAGCCTGCTGGCGTCCC | 64 |
| 6656 | TAGACAGCCTGCTGGCGTCC | 63 |
| 6657 | CTAGACAGCCTGCTGGCGTC | 62 |
| 6658 | GCTAGACAGCCTGCTGGCGT | 61 |
| 6659 | AGCTAGACAGCCTGCTGGCG | 60 |
| 6660 | CGACAATCAGCGAGGCACACAGGCT | 330 |
| 6661 | GACAATCAGCGAGGCACACA | 331 |
| 6662 | ACAATCAGCGAGGCACACAG | 332 |
| 6663 | CAATCAGCGAGGCACACAGG | 333 |
| 6664 | AATCAGCGAGGCACACAGGC | 334 |
| 6665 | ATCAGCGAGGCACACAGGCT | 335 |
| 6666 | TCAGCGAGGCACACAGGCTT | 336 |
| 6667 | CAGCGAGGCACACAGGCTTT | 337 |
| 6668 | AGCGAGGCACACAGGCTTTC | 338 |
| 6669 | GCGAGGCACACAGGCTTTCT | 339 |
| 6670 | CGAGGCACACAGGCTTTCTG | 340 |
| 6671 | CCGACAATCAGCGAGGCACA | 329 |
| 6672 | CCCGACAATCAGCGAGGCAC | 328 |
| 6673 | CCCCGACAATCAGCGAGGCA | 327 |
| 6674 | TCCCCGACAATCAGCGAGGC | 326 |
| 6675 | CTCCCCGACAATCAGCGAGG | 325 |
| 6676 | CCTCCCCGACAATCAGCGAG | 324 |
| 6677 | TCCTCCCCGACAATCAGCGA | 323 |
| 6678 | ATCCTCCCCGACAATCAGCG | 322 |
| 6679 | CATCCTCCCCGACAATCAGC | 321 |
| 6680 | ACATCCTCCCCGACAATCAG | 320 |
| 6681 | CACATCCTCCCCGACAATCA | 319 |
| 6682 | CCACATCCTCCCCGACAATC | 318 |
| 6683 | GCCACATCCTCCCCGACAAT | 317 |
| 6684 | AGCCACATCCTCCCCGACAA | 316 |
| 6685 | AAGCCACATCCTCCCCGACA | 315 |
| 6686 | CAAGCCACATCCTCCCCGAC | 314 |
| 6687 | CCAAGCCACATCCTCCCCGA | 313 |
| 6688 | TCCAAGCCACATCCTCCCCG | 312 |
| 6689 | CGGAGAGTAGAGAGGGTTCGCAGTGGCCC | 718 |
| 6690 | CCACGGGGCACAGGCCATAGCCCCG | 890 |
| 6691 | CACGGGGCACAGGCCATAGC | 891 |
| 6692 | ACGGGGCACAGGCCATAGCC | 892 |
| 6693 | CGGGGCACAGGCCATAGCCC | 893 |
| 6694 | GCCACGGGGCACAGGCCATA | 889 |
| 6695 | AGCCACGGGGCACAGGCCAT | 888 |
| 6696 | GAGCCACGGGGCACAGGCCA | 887 |
| 6697 | TGAGCCACGGGGCACAGGCC | 886 |
| 6698 | CTGAGCCACGGGGCACAGGC | 885 |
| 6699 | CCTGAGCCACGGGGCACAGG | 884 |
| 6700 | CCCTGAGCCACGGGGCACAG | 883 |
| 6701 | GCCCTGAGCCACGGGGCACA | 882 |
| 6702 | TGCCCTGAGCCACGGGGCAC | 881 |
| 6703 | CTGCCCTGAGCCACGGGGCA | 880 |
| 6704 | GCTGCCCTGAGCCACGGGGC | 879 |
| 6705 | GGCTGCCCTGAGCCACGGGG | 878 |
| 6706 | TGGCTGCCCTGAGCCACGGG | 877 |
| 6707 | CTGGCTGCCCTGAGCCACGG | 876 |
| 6708 | GCTGGCTGCCCTGAGCCACG | 875 |
| 6709 | CTCGTGCTCTCAGGCGGCGGTTGCGCCG | 3865 |
| 6710 | TCGTGCTCTCAGGCGGCGGT | 3866 |
| 6711 | CGTGCTCTCAGGCGGCGGTT | 3867 |
| 6712 | GTGCTCTCAGGCGGCGGTTG | 3868 |
| 6713 | TGCTCTCAGGCGGCGGTTGC | 3869 |
| 6714 | GCTCTCAGGCGGCGGTTGCG | 3870 |
| 6715 | CTCTCAGGCGGCGGTTGCGC | 3871 |
| 6716 | TCTCAGGCGGCGGTTGCGCC | 3872 |
| 6717 | CTCAGGCGGCGGTTGCGCCG | 3873 |
| 6718 | TCAGGCGGCGGTTGCGCCGG | 3874 |
| 6719 | CAGGCGGCGGTTGCGCCGGG | 3875 |
| 6720 | AGGCGGCGGTTGCGCCGGGG | 3876 |
| 6721 | GGCGGCGGTTGCGCCGGGGC | 3877 |
| 6722 | GCGGCGGTTGCGCCGGGGCC | 3878 |
| 6723 | CGGCGGTTGCGCCGGGGCCC | 3879 |
| 6724 | GGCGGTTGCGCCGGGGCCCC | 3880 |
| 6725 | GCGGTTGCGCCGGGGCCCCT | 3881 |
| 6726 | CGGTTGCGCCGGGGCCCCTG | 3882 |
| 6727 | GGTTGCGCCGGGGCCCCTGG | 3883 |
| 6728 | GTTGCGCCGGGGCCCCTGGC | 3884 |
| 6729 | TTGCGCCGGGGCCCCTGGCT | 3885 |
| 6730 | TGCGCCGGGGCCCCTGGCTC | 3886 |
| 6731 | GCGCCGGGGCCCCTGGCTCA | 3887 |
| 6732 | CGCCGGGGCCCCTGGCTCAG | 3888 |
| 6733 | GCCGGGGCCCCTGGCTCAGC | 3889 |
| 6734 | CCGGGGCCCCTGGCTCAGCT | 3890 |
| 6735 | CGGGGCCCCTGGCTCAGCTG | 3891 |
| 6736 | GCTCGTGCTCTCAGGCGGCG | 3864 |
| 6737 | AGCTCGTGCTCTCAGGCGGC | 3863 |
| 6738 | GAGCTCGTGCTCTCAGGCGG | 3862 |
| 6739 | GGAGCTCGTGCTCTCAGGCG | 3861 |
| 6740 | TGGAGCTCGTGCTCTCAGGC | 3860 |
| 6741 | TTGGAGCTCGTGCTCTCAGG | 3859 |
| 6742 | GTTGGAGCTCGTGCTCTCAG | 3858 |
| 6743 | GGTTGGAGCTCGTGCTCTCA | 3857 |
| 6744 | TGGTTGGAGCTCGTGCTCTC | 3856 |
| 6745 | GTGGTTGGAGCTCGTGCTCT | 3855 |
| 6746 | TGTGGTTGGAGCTCGTGCTC | 3854 |
| 6747 | TTGTGGTTGGAGCTCGTGCT | 3853 |
| 6748 | ATTGTGGTTGGAGCTCGTGC | 3852 |
| 6749 | AATTGTGGTTGGAGCTCGTG | 3851 |
| 6750 | GAATTGTGGTTGGAGCTCGT | 3850 |
| 6751 | AGAATTGTGGTTGGAGCTCG | 3849 |
| 6752 | CCGGGAGGTGGGGGCCGGTGCAGCACCGG | 4260 |
| 6753 | TCGCGTGCCCATCTGGGAGCCCCTCTCACG | 4395 |
| 6754 | CGCGTGCCCATCTGGGAGCC | 4396 |
| 6755 | GCGTGCCCATCTGGGAGCCC | 4397 |
| 6756 | CGTGCCCATCTGGGAGCCCC | 4398 |
| 6757 | CTCGCGTGCCCATCTGGGAG | 4394 |
| 6758 | ACTCGCGTGCCCATCTGGGA | 4393 |
| 6759 | AACTCGCGTGCCCATCTGGG | 4392 |
| 6760 | GAACTCGCGTGCCCATCTGG | 4391 |
| 6761 | TGAACTCGCGTGCCCATCTG | 4390 |
| 6762 | CTGAACTCGCGTGCCCATCT | 4389 |
| 6763 | CCTGAACTCGCGTGCCCATC | 4388 |
| 6764 | GCCTGAACTCGCGTGCCCAT | 4387 |
| 6765 | AGCCTGAACTCGCGTGCCCA | 4386 |
| 6766 | GAGCCTGAACTCGCGTGCCC | 4385 |
| 6767 | AGAGCCTGAACTCGCGTGCC | 4384 |
| 6768 | AAGAGCCTGAACTCGCGTGC | 4383 |
| 6769 | GAAGAGCCTGAACTCGCGTG | 4382 |
| 6770 | GGAAGAGCCTGAACTCGCGT | 4381 |
| 6771 | GGGAAGAGCCTGAACTCGCG | 4380 |
| 6772 | AGGGAAGAGCCTGAACTCGC | 4379 |
| 6773 | TAGGGAAGAGCCTGAACTCG | 4378 |

Hot Zones (Relative upstream location to gene start site)
1-950
1000-1300
2050-3000
3550-4500

### Examples

Genetic Code (5′ Upstream Region)

(SEQ ID NO: 11973)

AATGTGAAGGTTAAGGTCAGTAGGGCCAGGGAACTGTGAGATTGTGTCTT
GGACTGGGACAGACAGCCGGGCTAACCGCGTGAGAGGGGCTCCCAGATGG
GCACGCGAGTTCAGGCTCTTCCCTACTGGAAGCGCCGAGCGGCCGCACCT
CAGGGTCTCTCCTGGAGCCAGCACAGCTATTCGTGGTGATGATGCGCCCC
CCGGCGCCCCCAGCCCGGTGCTGCACCGGCCCCCACCTCCCGGCTTCCAG
AAAGCTCCCCTTGCTTTCCGCGGCATTCTTTGGGCGTGAGTCATGCAGGT
TTGCAGCCAGCCCCAAAGGGGGTGTGTGCGCGAGCAGAGCGCTATAAATA
CGGCGCCTCCCAGTGCCCACAACGCGGCGTCGCCAGGAGGAGCGCGCGGG
CACAGGGTGCCGCTGACCGGTGAGATGTCCCCGTCTTCCCTACCCTTGAG
CAGAGCCACACCAGGACGGATGGGCGGGCAGGGGATGGCAGCCAGGCAGA
GAGGGATGACACAGCTCGCAGTCACAACCCCTGCGCTTTCGACGGAGCCC
AGGAAGCCAGGGAGGGGAGGTGGCCGGAGCCCCATCACCAGGCAGCTGAG
CCAGGGGCCCCGGCGCAACCGCCGCCTGAGAGCACGAGCTCCAACCACAA
TTCTGTGGTGGGGGGGTAAATAGAACAGATATAATGATCATCCTTTCGCA
AAGATGGGGAAACTGAGACCTGGAGACCTGCCGCGTTGCGGGAGACCCAG
GCTAGCAGGTGACAGAGCTGGCCTGCACCGAGCTCCTTCCTGCAGCATAT
CCTCTGCGAAGATGCGGATCTCTCAGTTGTGGCTTTCGGCTTGCATGCAT
GAGTCATCTAGTTTTCTTCTAAATTCTCTAGCTCTCTGGACACTGTTGCC
TGTAAGTATGAGGCTGCGGATTTCAGTATATGCTGCAACCACCGAAATCC
GACTTTTTCTGCCTCCTAATGCATCTGAGGTGCATCAGAGAAAAGTCACA
CAAGATCCACCAGGCCTCAGACCTCTGATTCCACAGTCTCATTTTACAGA
TGATAATCTGAGGCCTGGAGAGGTTTAGGACTGGTGCCAACACTAAACAG
CAAATAAGTATCAGAATTGGGATTCGAGCCAAAGCCTCTTGACCTTCCAG
AATTTCTGGACCTAGTTAAAAAAAATATGATTTTTATTATTATTTTTTAA
ACGGAGAGGTTAGGAATTTAAAGGAAAGTACAGATACTATATAAAAAAAG
ATGCCCATGAAAATGTTAAGTTATAATAATAGTGGAGCATTGGGCACAAC
TGAAATGGCCAATCTTGTGAGAATGGTAAAATAAACTTAGGTCCGTGAGT
AAGTGGAGTATTACATAGCCATAAAAGTATGCCCTTAAAGAATATTTGAA
GATGGTGAATGTGAAGAATCTTGTATAAACTGCATGGAAGACAGAAGGAA
ATATACCACAGTGCTAACCTTTGCCTCTGGGTGATATGAATTACCGGTGA
TTATTTTTCTTATTTTCCTTTTGGTTTAGTTTTCTCCATTTGAAGAAGCA
GATAGGAGCCGGGGCTTTGGGATTGAAACCCTCACCATCTGTGTGCCCTC
TTCACTGTCTTCCCATCCTCCCCACGGCTCCCTGTTCACAGTCATTGATT
TTCTTTCTTTCTTTTCTCTCTTTTTTTTTTTTTTTCCTGAGACCAAGTCT
CACTCTGTTGCCCAGGCTGGAGTAGAGTAGCGCCATCTCGGCTCACTGCA
ACCTCCGCCATCCGGGTTCAAGCAGTTCTCATGCCTCAGCCTCTGAGTAG
CTGGGACTACAGGCGCATGCTGCTACATCCGGCTAATTTTTGTATTTTTA
GTAGAGACATGGTTTCACCACCTTGGCCAGGCTGGTCTCGAACTCCTGAT
CTCAAGTAATCCGCCTGTCTTGGCCTCCCAAAGTGCTGGGGTGACAGGTG
TGAATCAATGCGCCCTGCCAGGTCATTGATTTTCTTAAGCCTCCAGCCCT
GCCCTGCTTGGAAACGTTTTGGGAAGCTGCTCAGTTCAAAGTTCCCAGGA
GGGTGTGCCTGGAGGGGAGTTGCTCCCAAAGTCTGCCTGCTCCCCCCGCC
CCCCCTGCCCCCCACCCCCCGCCATCTTCTCCTCCTCCTCTTCCCCTGAG
CAGCCCCTTTGTCCACAGAACCGGCCTTTTCTGGTAGAAGGAGCAAGGCC
AAGTGGTTTAAGCCTTCTTAGGGAGAATGAGGCTGTGTGGTAGTGCTGGG
GACTCGAGGGCCTTGGCCTTGGCATGGCTCTTCCACCCAGGGCAGCTGGC
AGCCAGGCTCCCAGGAGGCAGAGGAGATGAGGGGGGAGGTGAGTCCGAGC
AAAGGAAAGGAGGTCGGCTGTGCAGTCACGGTTCTAGAACATTCCTTGGA
TCAGCAGCATCCATATCACCTGCAGACTGGCTGGAAAAGCAGTCTCAGAA
CCAACATTATAACCAGCCCTGCAGTGATTCATAAGTACTTTAAAAAGTGG
TCAATCATTTCAGCAAAGCAGAGCCACACAGTCCGGGGGACCACAGGTGG
CCTCTGTGTGCTTGTCTCGGTTTTCCTGCCCCTCTCCAGACATGTTGATT
AGACACTGCCAATGCCCAGCCTCAGACCTCAGTCTAATTTGGAAGTAGTC
AGAATTTACTATGATTACATAAGACCCTCGTGTTTACAGAACACATTCCC
CTCTCTGAGGTCTGGATTAGATCCATTTTACAGATGAAGAAACTGAGGCT
CAGATATTTAAGTGACTTGGAATCAAGGAAAGAATACTGGACTAGGGGTC
GGGAGGGCTGGGCTCTCATCCCAGGGTTACCATGAGCATGCTGTGGACTC
TAGGGAGTCCCATGCCCTCTCTGGGCTTCAGCCTCACCGCTAGGGTAGAG
AGGTTGGGTGAGAGAACGACCTCCTTCCCAGGTCTGAGCTGGATGGTTCA
CCAGGGACCCCAGGCTCCCTGGAGCAGACTCTGTGCCCGCTGCTGAGTCT
GGAATTCCTTTCCTGTATCTTGCCTTTGGCTGCCCCATTCTTCATGGCCC
AGCACCCTGTCTTCTGGTCAGAACCTAGTTCTGAATGGGTTTTTCCAGAA
GTTGTTGCTTTCAGGGGCCCCTGGCAGAGAGGTGTTTCTGGCTGGCTTTG
TCTCTCTGGCATGACAAAGGCTCTGTTCCTGCTGGAGGCATTTCAGGGCT
CAGTGGGCAGCTGGGGCAGAGCCCGTGAGACCACAGCCTTCCTGGTGAGC
CCGGTCTCCGCCCCCTACCCCATCTCTGGGGAAGGCGCTGACCCCATCTC
TTCTCCCACGCTGCTCCCTGGCTCTTTGCGCCTGATTACTTCTCATGAGA
GGCACTCCTTGTTAATGTGCTACTGAGTGTCCAGATGGGCCTGCTGGGCT
GAGCGGGCTTTGGATGTGAACCATTTCAGGAAGGGGAACCCCATCGTCCT
GTTGGTTCTGTGATGGCAAATGGGTGAGCTCAGATAAGCAGTTCTTGGGA
GGGGCATGGTGGGGGTGGAGTGCAGGGGGAGGGGTTTCTGTTTTATGCAA
CAGCCTCAGCTTCTGGGAAAGGGTCCATTGTGTAAGACCGGGGCTATGGC
CTGTGCCCCGTGGCTCAGGGCAGCCAGCCCAGTGGTGGCAGGAACACTGG
CAGGGCAGCCTGCTGTCGGCTTAGAGGGGATGGGCAGTGTGGAGGGCCTG
GCAGAGCAAGAGGACTCATCCTTCCAAAGGGACTTTCTCTGGGAAGCCTG
CTCCTCGGGCCACTGCGAACCCTCTCTACTCTCCGAAGGGAATTGTCCTT
CCTGGCTTCCACTACTTCCACCCCTGAATGCACAGGCAGCCCGGCCCAAG
TCTCCCACTAGGGATGCAGATGGATTCGGTGTGAAGGGCTGGCTGCTGTT
GCCTCCGGCTCTTGAAAGTCAAGTTCAGGTGGTGCTGAGACTCCCTGGGG
GCTGCAGCGCTGTGGTGAATGGGGAGCGTCTGCTGGGGTGAAGGTTTAGG
TGCACATTGCAGAGGACGTGGCTGGTCTCTGGGATGCAGTCCCTCTGTGG
AGGTGGCATGGGGAGGGACGGATGCATGACCTAAGGGGGGTATTTTCAGT
GTCTGACATGATCGATACCACTCTGGACAAGGAGGCCAGGATGCAGAAAG
CCTGTGTGCCTCGCTGATTGTCGGGGAGGATGTGGCTTGGACAAGAGCCT
GGTTCCTCCGATGCCAGGGTTCTTGTTTCTTCCACTCAACATTGCTGTCC
TGCAGTCCCTCCCTCCCTGCACCTCCTGCCTTCGCTTTCATTCGAGGTGT
CCATGGCAAGTCTGGTCATTTCCCCCCATTTCCTCAGGAATAAAAGTGCA
GCAGTGCCTGCTGTGGGGACAGCTGAGGGCAGTGAGGCCCTGGGGAGCTG
CTGCAGGCAGCAGGTGGGCGGGACGCCAGCAGGCTGTCTAGCTGTTCCCA
TGATGGTCTCCTGTTCTCTGCAGAGGCGTGCAAAGACTCCAGAATTGGAG
GCATG

[0399] 25. NRAS. The neuroblastoma RAS viral oncogene homolog (N-ras) oncogene is a member of the Ras gene family. It is mapped on chromosome 1, and it is activated in HL60, a promyelocytic leukemia line. The mammalian ras gene family consists of the harvey and kirsten ras genes (HRAS and KRAS), an inactive pseudogene of each (c-Hras2 and c-Kras1) and the N-ras gene. They differ significantly only in the C-terminal 40 amino acids. These ras genes have GTP/GDP binding and GTPase activity, and their normal function may be as G-like regulatory proteins involved in the normal control of cell growth. Mutations which change amino acid residues 12, 13 or 61 activate the potential of N-ras to transform cultured cells and are implicated in a variety of human tumors. The N-ras gene specifies two main transcripts of 2 Kb and 4.3 Kb. The difference between the two transcripts is a simple extension through the termination site of the 2 Kb transcript. The N-ras gene consists of seven exons (-I, I, II, III, IV, V, VI). The smaller 2 Kb transcript contains the VIa exon, and the larger 4.3 Kb transcript contains the VIb exon which is just a longer form of the VIa exon. Both transcripts encode identical proteins as they differ only the 3′ untranslated region (reviewed in Marshall et al., 1982 Nature 299 (5879): 171-3 and Shimizu et al., 1983 PNAS 80 (2): 383-7).

[0400] Protein: NRAS Gene: NRAS (Homo sapiens, chromosome 1, 115247085-115259515 [NCBI Reference Sequence: NC_{—}000001.10]; start site location: 115258781; strand: negative)

Gene Identification

| | |
|---|---|
| GeneID | 4893 |
| HGNC | 7989 |
| HPRD | 01273 |
| MIM | 164790 |

Targeted Sequences

| | | Relative |
|---|---|---|
| | | upstream |
| | | location to |
| Sequence | | gene |
| ID No: | Sequence (5′-3′) | start site |
| 6774 | CCCCGCCCTCAGCCTAAGCAATGGA | 234 |
| 6793 | GACCCCGGAACCGCCATGAACAGCCC | 559 |
| 6818 | CCCGCTACGTAATCAGTCGGCGCCCCA | 613 |
| 6961 | AACGCAAAAACACCGGATTAATATCGGCCT | 142 |
| 6963 | ATAAACGGCCTCTTTACCCAGAGATCA | 850 |
| 6971 | CGCCACCTTAAGTTTTTCCAGGCTGC | 1779 |

Target Shift Sequences

| | | Relative |
|---|---|---|
| | | upstream |
| | | location to |
| Sequence | | gene |
| ID No: | Sequence (5′-3′) | start site |
| 6774 | CCCCGCCCTCAGCCTAAGCAATGGA | 234 |
| 6775 | CCCGCCCTCAGCCTAAGCAA | 235 |
| 6776 | CCGCCCTCAGCCTAAGCAAT | 236 |
| 6777 | CGCCCTCAGCCTAAGCAATG | 237 |
| 6778 | GCCCCGCCCTCAGCCTAAGC | 233 |
| 6779 | GGCCCCGCCCTCAGCCTAAG | 232 |
| 6780 | GGGCCCCGCCCTCAGCCTAA | 231 |
| 6781 | TGGGCCCCGCCCTCAGCCTA | 230 |
| 6782 | TTGGGCCCCGCCCTCAGCCT | 229 |
| 6783 | CTTGGGCCCCGCCCTCAGCC | 228 |
| 6784 | CCTTGGGCCCCGCCCTCAGC | 227 |
| 6785 | TCCTTGGGCCCCGCCCTCAG | 226 |
| 6786 | GTCCTTGGGCCCCGCCCTCA | 225 |
| 6787 | AGTCCTTGGGCCCCGCCCTC | 224 |
| 6788 | CAGTCCTTGGGCCCCGCCCT | 223 |
| 6789 | ACAGTCCTTGGGCCCCGCCC | 222 |
| 6790 | AACAGTCCTTGGGCCCCGCC | 221 |
| 6791 | CAACAGTCCTTGGGCCCCGC | 220 |
| 6792 | TCAACAGTCCTTGGGCCCCG | 219 |
| 6793 | GACCCCGGAACCGCCATGAACAGCCC | 559 |
| 6794 | ACCCCGGAACCGCCATGAAC | 560 |
| 6795 | CCCCGGAACCGCCATGAACA | 561 |
| 6796 | CCCGGAACCGCCATGAACAG | 562 |
| 6797 | CCGGAACCGCCATGAACAGC | 563 |
| 6798 | CGGAACCGCCATGAACAGCC | 564 |
| 6799 | GGAACCGCCATGAACAGCCC | 565 |
| 6800 | GAACCGCCATGAACAGCCCC | 566 |
| 6801 | AACCGCCATGAACAGCCCCC | 567 |
| 6802 | ACCGCCATGAACAGCCCCCA | 568 |
| 6803 | CCGCCATGAACAGCCCCCAC | 569 |
| 6804 | CGCCATGAACAGCCCCCACC | 570 |
| 6805 | AGACCCCGGAACCGCCATGA | 558 |
| 6806 | GAGACCCCGGAACCGCCATG | 557 |
| 6807 | GGAGACCCCGGAACCGCCAT | 556 |
| 6808 | TGGAGACCCCGGAACCGCCA | 555 |
| 6809 | TTGGAGACCCCGGAACCGCC | 554 |
| 6810 | GTTGGAGACCCCGGAACCGC | 553 |
| 6811 | TGTTGGAGACCCCGGAACCG | 552 |
| 6812 | ATGTTGGAGACCCCGGAACC | 551 |
| 6813 | AATGTTGGAGACCCCGGAAC | 550 |
| 6814 | AAATGTTGGAGACCCCGGAA | 549 |
| 6815 | AAAATGTTGGAGACCCCGGA | 548 |
| 6816 | AAAAATGTTGGAGACCCCGG | 547 |
| 6817 | GAAAAATGTTGGAGACCCCG | 546 |
| 6818 | CCCGCTACGTAATCAGTCGGCGCCCCA | 613 |
| 6819 | CCGCTACGTAATCAGTCGGC | 614 |
| 6820 | CGCTACGTAATCAGTCGGCG | 615 |
| 6821 | GCTACGTAATCAGTCGGCGC | 616 |
| 6822 | CTACGTAATCAGTCGGCGCC | 617 |
| 6823 | TACGTAATCAGTCGGCGCCC | 618 |
| 6824 | ACGTAATCAGTCGGCGCCCC | 619 |
| 6825 | CGTAATCAGTCGGCGCCCCA | 620 |
| 6826 | GTAATCAGTCGGCGCCCCAG | 621 |
| 6827 | TAATCAGTCGGCGCCCCAGG | 622 |
| 6828 | AATCAGTCGGCGCCCCAGGC | 623 |
| 6829 | ATCAGTCGGCGCCCCAGGCG | 624 |
| 6830 | TCAGTCGGCGCCCCAGGCGC | 625 |
| 6831 | CAGTCGGCGCCCCAGGCGCC | 626 |
| 6832 | AGTCGGCGCCCCAGGCGCCT | 627 |
| 6833 | GTCGGCGCCCCAGGCGCCTG | 628 |
| 6834 | TCGGCGCCCCAGGCGCCTGA | 629 |
| 6835 | CGGCGCCCCAGGCGCCTGAG | 630 |
| 6836 | GGCGCCCCAGGCGCCTGAGT | 631 |
| 6837 | GCGCCCCAGGCGCCTGAGTC | 632 |
| 6838 | CGCCCCAGGCGCCTGAGTCC | 633 |
| 6839 | GCCCCAGGCGCCTGAGTCCC | 634 |
| 6840 | CCCCAGGCGCCTGAGTCCCC | 635 |
| 6841 | CCCAGGCGCCTGAGTCCCCG | 636 |
| 6842 | CCAGGCGCCTGAGTCCCCGC | 637 |
| 6843 | CAGGCGCCTGAGTCCCCGCC | 638 |
| 6844 | AGGCGCCTGAGTCCCCGCCC | 639 |
| 6845 | GGCGCCTGAGTCCCCGCCCC | 640 |
| 6846 | GCGCCTGAGTCCCCGCCCCG | 641 |
| 6847 | CGCCTGAGTCCCCGCCCCGG | 642 |
| 6848 | GCCTGAGTCCCCGCCCCGGC | 643 |
| 6849 | CCTGAGTCCCCGCCCCGGCC | 644 |
| 6850 | CTGAGTCCCCGCCCCGGCCA | 645 |
| 6851 | TGAGTCCCCGCCCCGGCCAC | 646 |
| 6852 | GAGTCCCCGCCCCGGCCACG | 647 |
| 6853 | AGTCCCCGCCCCGGCCACGT | 648 |
| 6854 | GTCCCCGCCCCGGCCACGTG | 649 |
| 6855 | TCCCCGCCCCGGCCACGTGG | 650 |
| 6856 | CCCCGCCCCGGCCACGTGGG | 651 |
| 6857 | CCCGCCCCGGCCACGTGGGC | 652 |
| 6858 | CCGCCCCGGCCACGTGGGCC | 653 |
| 6859 | CGCCCCGGCCACGTGGGCCT | 654 |
| 6860 | GCCCCGGCCACGTGGGCCTC | 655 |
| 6861 | CCCCGGCCACGTGGGCCTCC | 656 |
| 6862 | CCCGGCCACGTGGGCCTCCG | 657 |
| 6863 | CCGGCCACGTGGGCCTCCGA | 658 |
| 6864 | CGGCCACGTGGGCCTCCGAA | 659 |
| 6865 | GGCCACGTGGGCCTCCGAAC | 660 |
| 6866 | GCCACGTGGGCCTCCGAACC | 661 |
| 6867 | CCACGTGGGCCTCCGAACCA | 662 |
| 6868 | CACGTGGGCCTCCGAACCAC | 663 |
| 6869 | ACGTGGGCCTCCGAACCACG | 664 |
| 6870 | CGTGGGCCTCCGAACCACGA | 665 |
| 6871 | GTGGGCCTCCGAACCACGAG | 666 |
| 6872 | TGGGCCTCCGAACCACGAGT | 667 |
| 6873 | GGGCCTCCGAACCACGAGTC | 668 |
| 6874 | GGCCTCCGAACCACGAGTCA | 669 |
| 6875 | GCCTCCGAACCACGAGTCAT | 670 |
| 6876 | CCTCCGAACCACGAGTCATG | 671 |
| 6877 | CTCCGAACCACGAGTCATGC | 672 |
| 6878 | TCCGAACCACGAGTCATGCG | 673 |
| 6879 | CCGAACCACGAGTCATGCGG | 674 |
| 6880 | CGAACCACGAGTCATGCGGC | 675 |
| 6881 | GAACCACGAGTCATGCGGCA | 676 |
| 6882 | AACCACGAGTCATGCGGCAG | 677 |
| 6883 | ACCACGAGTCATGCGGCAGG | 678 |
| 6884 | CCACGAGTCATGCGGCAGGC | 679 |
| 6885 | CACGAGTCATGCGGCAGGCC | 680 |
| 6886 | ACGAGTCATGCGGCAGGCCG | 681 |
| 6887 | CGAGTCATGCGGCAGGCCGC | 682 |
| 6888 | GAGTCATGCGGCAGGCCGCA | 683 |
| 6889 | AGTCATGCGGCAGGCCGCAC | 684 |
| 6890 | GTCATGCGGCAGGCCGCACC | 685 |
| 6891 | TCATGCGGCAGGCCGCACCC | 686 |
| 6892 | CATGCGGCAGGCCGCACCCA | 687 |
| 6893 | ATGCGGCAGGCCGCACCCAG | 688 |
| 6894 | TGCGGCAGGCCGCACCCAGA | 689 |
| 6895 | GCGGCAGGCCGCACCCAGAC | 690 |
| 6896 | CGGCAGGCCGCACCCAGACC | 691 |
| 6897 | GGCAGGCCGCACCCAGACCC | 692 |
| 6898 | GCAGGCCGCACCCAGACCCG | 693 |
| 6899 | CAGGCCGCACCCAGACCCGC | 694 |
| 6900 | AGGCCGCACCCAGACCCGCC | 695 |
| 6901 | GGCCGCACCCAGACCCGCCC | 696 |
| 6902 | GCCGCACCCAGACCCGCCCC | 697 |
| 6903 | CCGCACCCAGACCCGCCCCT | 698 |
| 6904 | CGCACCCAGACCCGCCCCTC | 699 |
| 6905 | GCACCCAGACCCGCCCCTCC | 700 |
| 6906 | CACCCAGACCCGCCCCTCCC | 701 |
| 6907 | ACCCAGACCCGCCCCTCCCA | 702 |
| 6908 | CCCAGACCCGCCCCTCCCAC | 703 |
| 6909 | CCAGACCCGCCCCTCCCACA | 704 |
| 6910 | CAGACCCGCCCCTCCCACAC | 705 |
| 6911 | AGACCCGCCCCTCCCACACG | 706 |
| 6912 | GACCCGCCCCTCCCACACGG | 707 |
| 6913 | ACCCGCCCCTCCCACACGGG | 708 |
| 6914 | CCCGCCCCTCCCACACGGGA | 709 |
| 6915 | CCGCCCCTCCCACACGGGAC | 710 |
| 6916 | CGCCCCTCCCACACGGGACG | 711 |
| 6917 | GCCCCTCCCACACGGGACGT | 712 |
| 6918 | CCCCTCCCACACGGGACGTT | 713 |
| 6919 | CCCTCCCACACGGGACGTTT | 714 |
| 6920 | CCTCCCACACGGGACGTTTC | 715 |
| 6921 | CTCCCACACGGGACGTTTCA | 716 |
| 6922 | TCCCACACGGGACGTTTCAA | 717 |
| 6923 | CCCACACGGGACGTTTCAAT | 718 |
| 6924 | CCACACGGGACGTTTCAATA | 719 |
| 6925 | CACACGGGACGTTTCAATAA | 720 |
| 6926 | GCCCGCTACGTAATCAGTCG | 612 |
| 6927 | CGCCCGCTACGTAATCAGTC | 611 |
| 6928 | CCGCCCGCTACGTAATCAGT | 610 |
| 6929 | CCCGCCCGCTACGTAATCAG | 609 |
| 6930 | CCCCGCCCGCTACGTAATCA | 608 |
| 6931 | GCCCCGCCCGCTACGTAATC | 607 |
| 6932 | GGCCCCGCCCGCTACGTAAT | 606 |
| 6933 | CGGCCCCGCCCGCTACGTAA | 605 |
| 6934 | CCGGCCCCGCCCGCTACGTA | 604 |
| 6935 | TCCGGCCCCGCCCGCTACGT | 603 |
| 6936 | TTCCGGCCCCGCCCGCTACG | 602 |
| 6937 | CTTCCGGCCCCGCCCGCTAC | 601 |
| 6938 | ACTTCCGGCCCCGCCCGCTA | 600 |
| 6939 | CACTTCCGGCCCCGCCCGCT | 599 |
| 6940 | GCACTTCCGGCCCCGCCCGC | 598 |
| 6941 | GGCACTTCCGGCCCCGCCCG | 597 |
| 6942 | CGGCACTTCCGGCCCCGCCC | 596 |
| 6943 | GCGGCACTTCCGGCCCCGCC | 595 |
| 6944 | AGCGGCACTTCCGGCCCCGC | 594 |
| 6945 | GAGCGGCACTTCCGGCCCCG | 593 |
| 6946 | GGAGCGGCACTTCCGGCCCC | 592 |
| 6947 | AGGAGCGGCACTTCCGGCCC | 591 |
| 6948 | AAGGAGCGGCACTTCCGGCC | 590 |
| 6949 | CAAGGAGCGGCACTTCCGGC | 589 |
| 6950 | CCAAGGAGCGGCACTTCCGG | 588 |
| 6951 | ACCAAGGAGCGGCACTTCCG | 587 |
| 6952 | CACCAAGGAGCGGCACTTCC | 586 |
| 6953 | CCACCAAGGAGCGGCACTTC | 585 |
| 6954 | CCCACCAAGGAGCGGCACTT | 584 |
| 6955 | CCCCACCAAGGAGCGGCACT | 583 |
| 6956 | CCCCCACCAAGGAGCGGCAC | 582 |
| 6957 | GCCCCCACCAAGGAGCGGCA | 581 |
| 6958 | AGCCCCCACCAAGGAGCGGC | 580 |
| 6959 | CAGCCCCCACCAAGGAGCGG | 579 |
| 6960 | ACAGCCCCCACCAAGGAGCG | 578 |
| 6961 | AACGCAAAAACACCGGATTAATATCGGCCT | 142 |
| 6962 | GAACGCAAAAACACCGGATT | 141 |
| 6963 | ATAAACGGCCTCTTTACCCAGAGATCA | 850 |
| 6964 | TAAACGGCCTCTTTACCCAG | 851 |
| 6965 | AAACGGCCTCTTTACCCAGA | 852 |
| 6966 | AACGGCCTCTTTACCCAGAG | 853 |
| 6967 | ACGGCCTCTTTACCCAGAGA | 854 |
| 6968 | CGGCCTCTTTACCCAGAGAT | 855 |
| 6969 | GATAAACGGCCTCTTTACCC | 849 |
| 6970 | AGATAAACGGCCTCTTTACC | 848 |
| 6971 | CGCCACCTTAAGTTTTTCCAGGCTGC | 1779 |
| 6972 | GCGCCACCTTAAGTTTTTCC | 1778 |
| 6973 | GGCGCCACCTTAAGTTTTTC | 1777 |
| 6974 | AGGCGCCACCTTAAGTTTTT | 1776 |
| 6975 | AAGGCGCCACCTTAAGTTTT | 1775 |
| 6976 | TAAGGCGCCACCTTAAGTTT | 1774 |
| 6977 | ATAAGGCGCCACCTTAAGTT | 1773 |
| 6978 | TATAAGGCGCCACCTTAAGT | 1772 |
| 6979 | CTATAAGGCGCCACCTTAAG | 1771 |
| 6980 | ACTATAAGGCGCCACCTTAA | 1770 |
| 6981 | TACTATAAGGCGCCACCTTA | 1769 |
| 6982 | ATACTATAAGGCGCCACCTT | 1768 |
| 6983 | GATACTATAAGGCGCCACCT | 1767 |
| 6984 | TGATACTATAAGGCGCCACC | 1766 |
| 6985 | TTGATACTATAAGGCGCCAC | 1765 |

Hot Zones (Relative upstream location to gene start site)
1-950
1700-2000

### Examples

Genetic Code (5′ Upstream Region)

(SEQ ID NO: 11974)

CCACATCCACAAAGCACACCATTAATCCACTATGATCAAGTTGGGGGGAA
TCTGGTGAAGGGTTCTGAATATCTCCCTCTTCATCCCTCCCGAAATCTGG
AATACTTATTCTATTGAGCTATTACACCAGTTTTAACACCTTCCTCGTGT
TATGTTTAAAAAAATAAATAAATTTAAGAAAACCATTTTAAATAATGCAC
AGTTGCAGCCTGGAAAAACTTAAGGTGGCGCCTTATAGTATCAATTTTAG
GAGCTTTATTTGGTGCATTTAACGCAACTGGTAATTGCAGAATCCACTTT
GCCTGTGTAAGTGAAAAATATAGACTGTTATCTTGTTGGCCCTATGAAAT
TCTGCACTTTTCATTATATACTCTACCTTCATTAATTACTTCTGGCAAGA
TGTTCTGCCTTAGCACTCAGTTGCATTCTTTTCCTTTTTCTTCCTGTTCA
TTATGCTTTAATTCTGAGGACCATATGAGGGTAGAATATATTATCTTTTA
AAAATTACAAAAATTTGTATAGGCAAACCATTTCTTAAAGTTGATGGCCA
AATTTTAAAATGTTATTTTTCATATCATTTATAATCTTGTCACAATCCAC
TTAAAGAAGTTTGGTTATATTTCAGTGAAAATTTTCTTCCAGAGTAGGTT
TTTTTTCGTGGGTTGGGGGGTAACTTTACTACAATTAGTAAGTATGGTGC
AGAATTTCATGCAAATGAGGAGTGCCAGCAGTGTGATAATTTAAACATAT
TTAAACAAAAACAAAAAAAATGAATGCACAAACTTGCTGCTGCTTAGATC
ACTGCAGCTTCTAGGACCCGGTTTCTTTTACTGATTTAAAAACAAAACAA
AAAAAAATAAAAAAGTTGTGCCTGAAATGAATCTTGTTTTTTTTTATAAG
TAGCCGCCTGGTTACTGTGTCCTGTAAAATACAGACACTTGACCCTTGGT
GTAGCTTCTGTTCAACTTTATATCACGGGAATGGATGGGTCTGATTTCTT
GGCCCTCTTCTTGAATTGGCCATATACAGGGTCCCTGGCCAGTGGACTGA
AGGCTTTGTCTAAGATGACAAGGGTCAGCTCAGGGGATGTGGGGGAGGGC
GGTTTTATCTTCCCCCTTGTCGTTTGAGGTTTTGATCTCTGGGTAAAGAG
GCCGTTTATCTTTGTAAACACGAAACATTTTTGCTTTCTCCAGTTTTCTG
TTAATGGCGAAAGAATGGAAGCGAATAAAGTTTTACTGATTTTTGAGACA
CTAGCACCTAGCGCTTTCATTATTGAAACGTCCCGTGTGGGAGGGGCGGG
TCTGGGTGCGGCCTGCCGCATGACTCGTGGTTCGGAGGCCCACGTGGCCG
GGGCGGGGACTCAGGCGCCTGGGGCGCCGACTGATTACGTAGCGGGCGGG
GCCGGAAGTGCCGCTCCTTGGTGGGGGCTGTTCATGGCGGTTCCGGGGTC
TCCAACATTTTTCCCGGCTGTGGTCCTAAATCTGTCCAAAGCAGAGGCAG
TGGAGCTTGAGGTAAGTTTATCTCATGCATAGTGTTCGGCTTTGGGCTGT
GGAATGTTCAGGCGTTTCACTGATGCCAGAAATGGAGCAGAATCTATCAG
CTGGAGACAAAGGCCTTGGGCGGGGGTCCTTCCATTTGGTGCCTACGTGG
GGAGATCTTTGGAGACAGAAGGGAGAATGGGAAGGAGTTGCGGCCTGGAG
GCTTCCTGCTAGAGCTGAGAAGCCTTCGGGGAGTAATAGGAAGGGGGATT
TCCATTGCTTAGGCTGAGGGCGGGGCCCAAGGACTGTTGAAAAATAGCTA
AGGATGGGGGTTGCTAGAAAACTACTCCAGAAGTGTGAGGCCGATATTAA
TCCGGTGTTTTTGCGTTCTCTAGTCACTTTAAGAACCAAATGGAAGGTCA
CACTAGGGTTTTCATTTCCATTGATTATAGAAAGCTTTAAAGTACTGTAG
ATGTGGCTCGCCAATTAACCCTGATTACTGGTTTCCAACAGGTTCTTGCT
GGTGTGAAATG

[0402] 26. EZH2. Histone-lysine N-methyltransferase (EZH2) is an enzyme that belongs to the Polycomb-group (PcG) family. PcG family members form multimeric protein complexes, which are involved in maintaining the transcriptional repressive state of genes over successive cell generations. EZH2 acts mainly as a gene silencer; it performs this role by the addition of three methyl groups to Lysine 27 of histone 3, a modification leading to chromatin condensation (Cao et al., 2002, Science 298 (5595): 1039-43). Mutations in in the EZH2 gene cause Weaver syndrome (Gibson et al., 2011: Am J Hum Genet 90 (1): 110-8). EZH2 overproduction may cause cancer due to increase in histone methylation. This histone methylation may play a role in silencing the expression of tumor suppressor genes, which may cause certain cancers. The microRNA produced by miR-101 normally inhibits translation of the messenger RNA coding for EZH2. Loss of this microRNA gene therefore leads to increased production of EZH2.

[0403] Protein: EZH2 Gene: EZH2 (Homo sapiens, chromosome 7, 148504464-148581441 [NCBI Reference Sequence: NC_{—}000007.13]; start site location: 148544390; strand: negative)

Gene Identification

| | |
|---|---|
| GeneID | 2146 |
| HGNC | 3527 |
| HPRD | 03342 |
| MIM | 601573 |

Targeted Sequences

| | | Relative |
|---|---|---|
| | | upstream |
| | | location to |
| Sequence | | gene |
| ID No: | Sequence (5′-3′) | start site |
| 6986 | TCCCGACAAGGGGTGACAGAGGC | 1002 |
| 7002 | CGTGAATTCAAGAGTTGCTTAGGCC | 1059 |
| 7003 | GACTACCGGTGCCCGCCACCACGCCAGGC | 2856 |
| 7035 | CCCCCGCCAACCCCACAGCGGATGCCCCC | 34593459 |
| | CGCCAACCCCACAGCGGATGC | |

Target Shift Sequences

| | | Relative |
|---|---|---|
| | | upstream |
| | | location to |
| Sequence | | gene |
| No: | Sequence (5′-3′) | start site |
| 6986 | TCCCGACAAGGGGTGACAGAGGC | 1002 |
| 6987 | ATCCCGACAAGGGGTGACAG | 1001 |
| 6988 | CATCCCGACAAGGGGTGACA | 1000 |
| 6989 | GCATCCCGACAAGGGGTGAC | 999 |
| 6990 | AGCATCCCGACAAGGGGTGA | 998 |
| 6991 | CAGCATCCCGACAAGGGGTG | 997 |
| 6992 | ACAGCATCCCGACAAGGGGT | 996 |
| 6993 | CACAGCATCCCGACAAGGGG | 995 |
| 6994 | GCACAGCATCCCGACAAGGG | 994 |
| 6995 | AGCACAGCATCCCGACAAGG | 993 |
| 6996 | CAGCACAGCATCCCGACAAG | 992 |
| 6997 | GCAGCACAGCATCCCGACAA | 991 |
| 6998 | TGCAGCACAGCATCCCGACA | 990 |
| 6999 | CTGCAGCACAGCATCCCGAC | 989 |
| 7000 | GCTGCAGCACAGCATCCCGA | 988 |
| 7001 | TGCTGCAGCACAGCATCCCG | 987 |
| 7002 | CGTGAATTCAAGAGTTGCTTAGGCC | 1059 |
| 7003 | GACTACCGGTGCCCGCCACCACGCCAGGC | 2856 |
| 7004 | ACTACCGGTGCCCGCCACCA | 2857 |
| 7005 | CTACCGGTGCCCGCCACCAC | 2858 |
| 7006 | TACCGGTGCCCGCCACCACG | 2859 |
| 7007 | ACCGGTGCCCGCCACCACGC | 2860 |
| 7008 | CCGGTGCCCGCCACCACGCC | 2861 |
| 7009 | CGGTGCCCGCCACCACGCCA | 2862 |
| 7010 | GGTGCCCGCCACCACGCCAG | 2863 |
| 7011 | GTGCCCGCCACCACGCCAGG | 2864 |
| 7012 | TGCCCGCCACCACGCCAGGC | 2865 |
| 7013 | GCCCGCCACCACGCCAGGCT | 2866 |
| 7014 | CCCGCCACCACGCCAGGCTA | 2867 |
| 7015 | CCGCCACCACGCCAGGCTAA | 2868 |
| 7016 | CGCCACCACGCCAGGCTAAT | 2869 |
| 7017 | GCCACCACGCCAGGCTAATT | 2870 |
| 7018 | CCACCACGCCAGGCTAATTT | 2871 |
| 7019 | CACCACGCCAGGCTAATTTT | 2872 |
| 7020 | ACCACGCCAGGCTAATTTTT | 2873 |
| 7021 | CCACGCCAGGCTAATTTTTT | 2874 |
| 7022 | CACGCCAGGCTAATTTTTTG | 2875 |
| 7023 | GGACTACCGGTGCCCGCCAC | 2855 |
| 7024 | GGGACTACCGGTGCCCGCCA | 2854 |
| 7025 | TGGGACTACCGGTGCCCGCC | 2853 |
| 7026 | GTGGGACTACCGGTGCCCGC | 2852 |
| 7027 | GGTGGGACTACCGGTGCCCG | 2851 |
| 7028 | AGGTGGGACTACCGGTGCCC | 2850 |
| 7029 | TAGGTGGGACTACCGGTGCC | 2849 |
| 7030 | GTAGGTGGGACTACCGGTGC | 2848 |
| 7031 | AGTAGGTGGGACTACCGGTG | 2847 |
| 7032 | AAGTAGGTGGGACTACCGGT | 2846 |
| 7033 | CAAGTAGGTGGGACTACCGG | 2845 |
| 7034 | CCAAGTAGGTGGGACTACCG | 2844 |
| 7035 | GACCGCCCCCCGCCAACCCCACAGCGG | 3453 |
| 7036 | ACCGCCCCCCGCCAACCCCA | 3454 |
| 7037 | CCGCCCCCCGCCAACCCCAC | 3455 |
| 7038 | CGCCCCCCGCCAACCCCACA | 3456 |
| 7039 | GCCCCCCGCCAACCCCACAG | 3457 |
| 7040 | CCCCCCGCCAACCCCACAGC | 3458 |
| 7041 | CCCCCGCCAACCCCACAGCG | 3459 |
| 7042 | CCCCGCCAACCCCACAGCGG | 3460 |
| 7043 | CCCGCCAACCCCACAGCGGA | 3461 |
| 7044 | CCGCCAACCCCACAGCGGAT | 3462 |
| 7045 | CGCCAACCCCACAGCGGATG | 3463 |
| 7046 | GCCAACCCCACAGCGGATGC | 3464 |
| 7047 | CCAACCCCACAGCGGATGCC | 3465 |
| 7048 | CAACCCCACAGCGGATGCCT | 3466 |
| 7049 | AACCCCACAGCGGATGCCTA | 3467 |
| 7050 | ACCCCACAGCGGATGCCTAA | 3468 |
| 7051 | CCCCACAGCGGATGCCTAAA | 3469 |
| 7052 | CCCACAGCGGATGCCTAAAG | 3470 |
| 7053 | CCACAGCGGATGCCTAAAGC | 3471 |
| 7054 | CACAGCGGATGCCTAAAGCT | 3472 |
| 7055 | ACAGCGGATGCCTAAAGCTG | 3473 |
| 7056 | CAGCGGATGCCTAAAGCTGC | 3474 |
| 7057 | AGCGGATGCCTAAAGCTGCA | 3475 |
| 7058 | GCGGATGCCTAAAGCTGCAG | 3476 |
| 7059 | CGGATGCCTAAAGCTGCAGA | 3477 |
| 7060 | AGACCGCCCCCCGCCAACCC | 3452 |
| 7061 | AAGACCGCCCCCCGCCAACC | 3451 |
| 7062 | CAAGACCGCCCCCCGCCAAC | 3450 |
| 7063 | CCAAGACCGCCCCCCGCCAA | 3449 |
| 7064 | CCCAAGACCGCCCCCCGCCA | 3448 |
| 7065 | TCCCAAGACCGCCCCCCGCC | 3447 |
| 7066 | CTCCCAAGACCGCCCCCCGC | 3446 |
| 7067 | TCTCCCAAGACCGCCCCCCG | 3445 |
| 7068 | ATCTCCCAAGACCGCCCCCC | 3444 |
| 7069 | TATCTCCCAAGACCGCCCCC | 3443 |
| 7070 | TTATCTCCCAAGACCGCCCC | 3442 |
| 7071 | CTTATCTCCCAAGACCGCCC | 3441 |
| 7072 | ACTTATCTCCCAAGACCGCC | 3440 |
| 7073 | CACTTATCTCCCAAGACCGC | 3439 |
| 7074 | CCACTTATCTCCCAAGACCG | 3438 |

```
Hot Zones (Relative upstream location to gene start site)
  1-300
  900-1100
2600-3100
3400-4200
```

### Examples

[0404] In FIG. 46, In MCF7 (human mammary breast cell line), EZH2_{—}2 (271) produced statistically significant (P<0.05) inhibition at 10 μM compared to the untreated and negative control values. The EZH2 sequence EZH2_{—}2 (271) fits the independent and dependent DNAi motif claims.

[0405] The secondary structure for EZH2_{—}2 (271) is shown in FIG. 47.

Genetic Code (5′ Upstream Region)

(SEQ ID NO: 11975)

CACAGGCTCAAGAGATCCTCCCACCTCAGCTTCCTGAGTAGTTGGGACCA
CAGGTGTGCGCCACTACACCTGGCTTGCTTGCTTGCTTATTTATTGATTT
GAGATGGGAGTCTCACTATATTGCCTAGGCTGGTCTTGAACTCCTGGGCT
CAATCCTCCAACCTTGGCCTCCCAAAATGCTGGGTTTACAGGCTTGAACC
ACTGTACGTGGCCTTGAATCTGTGTTTTAATACTATGCTTACTTGGCTGT
GGTGTTGTGAAAAGATCACTGAAAATGGAGTCAGAGGCCTGATTTGAGCC
AGTCGTTTGTTGTGGGGGAAGGAGGTCAGGGGAGCTAACATCTAAAGGCT
CACTATATGCCAGGCACAGAACCAAGTGTGTTTGCATGTATATTTCGTTT
TTGTTGCCAGACTTTGAGGTAGGTTTTATGGATAAGGTCTTTAAGGCAAT
ATCAGCTTCCTTTTAAAAAAGAAATTCCGGAAACTGAGTTTTAGGCTGAA
GATCTCTAACTGGTAGTAGGGACAACTGAACCACAGGGTCCTAACTGACC
CTGCGATTTATCTCCTTTTGCGGGGGGTTTCTTGATAATAGGGTGCACTT
TACCTCATTTTTTGGCTCAAGCATGGATAGGCCACCCTTCCTTTTCATAC
CTATAGCTAAGCTTTACAAATGATATGCTGATAAGATACAAGCTACTCGT
TATTCATGTGGGTTAATAGACCTGTTTGTTTGCTTGTTTTTAAGTCTATA
GCCGCCCCACCCCCAATCTACAATTTCACCTTCTAAGGTTTTAGTTACTC
ATTCAAACTGCAGTCTGAAAATGTTACGATATTTTGAGAGAGAGAAGACT
CTAGCTACGTAACTTTTGTAACAATATATTGTTATAATTGTTCATTTTAC
CATTAGTTATTGCTGTCAGTCTCTTACTGTGCCTTATTTATAAATTAAAC
TTCATGGGTATGTACGTATAGGAAAAAACATGGTATATTTAGAGTTTAGT
ACTATCTGCAGCTTTAGGCATCCGCTGTGGGGTTGGCGGGGGGCGGTCTT
GGGAGATAAGTGGGGACTACTGTACAATTATCAGGCACACACAGGCTCTG
GGATTTTACAAATGAGTAAAAGTGGTTCTTGCTGTTGAAGCACTTACAGT
GGGAATAGAGTGAAATACATGAAAATGTGATTTTAATATGTTATAAATGC
TATGATGGTGGGAGTTTGTTTTGTGTAAAACATCCTTTTAATTGGTACTT
TAAATTTTAATATTCTTTCACAGGTCTACCTATTTAGTCTTACACTTTCA
AAGAACTACCTGGATGCTGTAGATTTTCATGATATACTTTATTAGGTATG
TTATTAATGGTAGAAACAGCATGGAAAGTCTTCCAGAATATTAGACAAGG
ACAGTTCTAGTACTAAAACATAAAATGCTAACTAATGTCTTCATCAAGAC
ATAAAATATGTATCTTAAAAAATAAATTGTAAGCCAGGCGCAGTGGCTCA
CACCTGTAATCCCAGCACTTTGGGAGGCTGAGGCGGGTGGATCACAAGGT
CAGGAGATTGAGACCATCCTGGCTAACACGGTGAAACCCTGTCTCTACTA
AAAATACAAAAAATTAGCCTGGCGTGGTGGCGGGCACCGGTAGTCCCACC
TACTTGGGAGGCTGAGGCAGGAGAATGGCGTGAACCCGGGAGGCAGAGCT
TGCAGTGAGCGGAGATTGCACCACCGCACTCCAGCTTGGGGGACAGAGTG
AGACTCCATCTCAAAAAAAAAGAAATTGTAATAACACCCACATTATACAT
CAGTGAAAACTAAACACGTTACTACCCTAGGCCTTATTGCACAGGGGTGC
TACCTCCAAGGAGAAATTTGTCTAGGCAGCAGATGGACTAGAGGTGATTA
GCCTATGAGCGAATGAGGCTACAGATCATTCCTTTTTATCTGATTCCTTT
TCTTTCTAGTTCCTAGGCCTTGGAAGCACTAAGTGGTCTTAAGTAATTTG
CATAGAATTAGTTGAGTTCATCTGTTAACTAACTAGCAGATAGGAAGAAA
ACTATTGTCATGAAATTATTTAAAAAATAATAATGCTCCAGTTTCTTCTC
ATCTTTGATGTCCTTTGGTCCTACCTCACTGCCTTCCTAACACCATTTTC
TGCTTTACCTCAAAGCTGGGGTCATCTTGAGTTTAGCCTGCTTAATCCGA
GTGACTGTCAGCTTTATTCCACTTTAGCAACTCGCAGGCAAGGCCACACT
TGGAAACTTTTCACTTGGAATAGTTCTATCTTGGTGATTTCATCAGCCTT
CTTTATGTCAAATACACTCAAATTCCTGCCCATTCTTATCTCTTCGTTCC
CTTCAGGTCCTTAGTCCTTTTAATTTGTGACTTTCATTCTCCAGGTCCAT
TCTTATTAAATGTCTGCCAGCCAGACTTTAGTTGCCCCCTGTCCAGCTTT
CTCTTGCTCAGACCTAAGATTTCTTTAGGTTCTTTCTTTGCCTTTTGAAA
TCCAGCTCAGCTTTTAAGATTGAGTTCCTTGTTACCTTTCCTGCCATCCT
TCTGCAGTTCCTAATATTCTTTTCTTTCTCCCAAAGTGCTTTTGTATAAA
CAGTCAGCCTTCCATATCCGTGAGTTCCAAATCCATGGATCCTGAATTCA
TGGATTTAACCAGCTGCAGATAAAAAATATTCAGAAAAAAAAAGATGGTT
GCATCTGTACTGAACATGTCTGTACTGTTTTGCTTGTCATTATTTTCTAA
ACAATACAGTATAACAACTATTTACATGGCATTTACATTGTATTAGGGAT
TATAAGTAATCTAGAGGTGATTTAAAGTATATGGGAGTCTCTTATATCCC
AGGAAGCCAGGTAAAAAAAAAAAGTATATGGGAGGCTATGCATAGGTGAT
ATGCAAATATTACACCACTTTATATCACGGACTTTTGAGCATCTGTGGAT
TTTGGTATCCGAGGGGTGTCCTGGAACCAGTTCCCCAGGGATACTGAAGT
ATGTCTGTCTATCTCATACTATATTTTTCCCTTTGTCTTAGGTAGACTAT
CAGCTCCATAGGGGCAAGGATTTAATAATATTTGTATATTCATTTTATTC
AAGTTCGTATACACTGCTTGGGTCATAATATTTATTACATGCTTGAGAAA
ATGAATTTCTTCGCCCCTTTGTTACAGCTCTGAGTAAACAGCCATCTGCC
TTCTCTGTCATCTGTTGGTGGTTGAGTATTTCTGTAGAAAGTTACCCATT
GGCCTCAGGACTCTTACTCTAAATCTTCTTCTTAGGCAGTTTTCTCTGTG
CATGAAGTTTTTATGTAAACAAATAGATGAAGCCTGCCCTACTCATTTAT
TTGCTCAAGCCAGAAAGTCACCTTCTTCTTCACTTTCCATATTTAAATCA
TCATTTGGTGGAATTTTGGCCTAAGCAACTCTTGAATTCACGTACTTTTC
CCTGTCATCGCCAGTGTGGTGTAGAAGCCTCTGTCACCCCTTGTCGGGAT
GCTGTGCTGCAGCATCATCTAACCTGGTTGCAGTTATTCTTTCACTCCCT
CACCGCACACCCTTTTACTTAAAACACTAAAAGTGGCTTCTCATTGTTCT
TAAGATAAAGCACAAATTGTTAGTGTGGCCTGTAAAGCTTTGCATAGCCT
GACAGAGAATGTCCTGCTAATAATTTGAAGGTACAGGATGATTTTAATAC
TTTAGGAGAAAATGTTCTAGGAAAAGACGCTTGTTTAGACTTAAGGTGAG
GACTCTGCAGTATGAATTAGACATCTGGTGAACTATAAGCTGTCCCCGCA
TTTAAACATAATTGGTTCTGAGAGCCTGCAACTAAAGATAAGGCAGAAGA
ATTTACTTTGCATTTCCTGCATTCCTCTTTTCGCTTGATAGCAGAAACCC
CTCATGTTAATAAAGGTGGCACAAGAGGCAAAAATACAGACTTTATCACA
GTGTTTAAGGAGAGGTGCATGATTAAGTGTGTGGGGAGAGAGTACCTTTG
TACATTTTATTATATGGTGAACTGTATGTTTTCTACTTTTAGTACTGTTT
GTAAATTTTACTTCTTCTTGGATTTACCTTTTTCAGTTATATTATTCCAT
TATGCCTTGCTACTGTAACAGCTAATGATGAAAAACAGGATCTGTCTTTA
TATTTTCTTCCCTCCACAAATGTGGATCTCATAGAGTTGAAAACTAGGTT
GTGATATAGTATAGTATACCTAATTCCTGTAATGGGATCATGTTCCTATA
ATATGGCCGCAATTTAGTGTAGAATTTTTGTAAATAAAAGTGTATTTTAA
GTTTAACTTAAACTTTCAATGAAGTGTTTTAAGGATTTAACCATGCAGCA
CAAATGAGCACCTTTCTGTAAATGCCAACAGTGTAATATGTGTCATTTCT
TCACTGATTGTTAGTTTGCTGCGGATTAAAACACAGGTGATCATATTCAG
GCTGGTTAGATTAGTGATTTTAATATGAAACCATTGCTTTTAGAATAATC
ATG

[0406] 27. HDACs, such as HDAC1.

[0407] Histone deacetylases (HDACs) are part of a vast family of enzymes that have crucial roles in numerous biological processes, largely through their repressive influence on transcription (reviewed by Haberland et al, 2009 Nature Reviews Genetics 10, 32-42. HDAC1 is an enzyme that belongs the histone deacetylase family and is a component of the histone deacetylase complex (Taunton et al, Science 272 (5260): 408-11) Histone acetylation and deacetylation, is catalyzed by multisubunit complexes and is key in the expression of gene expression. It also interacts with retinoblastoma tumor-suppressor protein and this complex is a key element in the control of cell proliferation and differentiation. Together with metastasis-associated protein-2 MTA2, it deacetylates p53 and modulates its effect on cell growth and apoptosis.

[0408] Protein: HDAC1 Gene: HDAC1 (Homo sapiens, chromosome 1, 32757708-32799224 [NCBI Reference Sequence: NC_{—}000001.10]; start site location: 32757771; strand: positive)

Gene Identification

| | |
|---|---|
| GeneID | 3065 |
| HGNC | 4852 |
| HPRD | 03143 |
| MIM | 601241 |

Targeted Sequences

| | | Relative |
|---|---|---|
| | | upstream |
| | | location to |
| Sequence | | gene |
| ID No: | Sequence (5′-3′) | start site |
| 7075 | CGCCTCCCGTCCCTACCGTCAGTCGGT | 7 |
| 7141 | CGGTCCGTCCGCCCTCCCGCCCGCGG | 30 |
| 7207 | CGCCAACTTGTGGTCCTACAGTCAACAAG | 1740 |
| 7226 | CGCAGACACGGGCCCGGAACTCGG | 173 |
| 7258 | CGCCCGGCCTAGGAGGGCAGGTTTCTC | 1252 |

Target Shift Sequences

| | | Relative |
|---|---|---|
| | | upstream |
| | | location to |
| Sequence | | gene |
| ID No: | Sequence (5′-3′) | start site |
| 7075 | CGCCTCCCGTCCCTACCGTCAGTCGGT | 7 |
| 7076 | GCCTCCCGTCCCTACCGTCA | 8 |
| 7077 | CCTCCCGTCCCTACCGTCAG | 9 |
| 7078 | CTCCCGTCCCTACCGTCAGT | 10 |
| 7079 | TCCCGTCCCTACCGTCAGTC | 11 |
| 7080 | CCCGTCCCTACCGTCAGTCG | 12 |
| 7081 | CCGTCCCTACCGTCAGTCGG | 13 |
| 7082 | CGTCCCTACCGTCAGTCGGT | 14 |
| 7083 | GTCCCTACCGTCAGTCGGTC | 15 |
| 7084 | TCCCTACCGTCAGTCGGTCC | 16 |
| 7085 | CCCTACCGTCAGTCGGTCCG | 17 |
| 7086 | CCTACCGTCAGTCGGTCCGT | 18 |
| 7087 | CTACCGTCAGTCGGTCCGTC | 19 |
| 7088 | TACCGTCAGTCGGTCCGTCC | 20 |
| 7089 | ACCGTCAGTCGGTCCGTCCG | 21 |
| 7090 | CCGTCAGTCGGTCCGTCCGC | 22 |
| 7091 | CGTCAGTCGGTCCGTCCGCC | 23 |
| 7092 | GTCAGTCGGTCCGTCCGCCC | 24 |
| 7093 | TCAGTCGGTCCGTCCGCCCT | 25 |
| 7094 | CAGTCGGTCCGTCCGCCCTC | 26 |
| 7095 | AGTCGGTCCGTCCGCCCTCC | 27 |
| 7096 | GTCGGTCCGTCCGCCCTCCC | 28 |
| 7097 | TCGGTCCGTCCGCCCTCCCG | 29 |
| 7098 | CGGTCCGTCCGCCCTCCCGC | 30 |
| 7099 | GGTCCGTCCGCCCTCCCGCC | 31 |
| 7100 | GTCCGTCCGCCCTCCCGCCC | 32 |
| 7101 | TCCGTCCGCCCTCCCGCCCG | 33 |
| 7102 | CCGTCCGCCCTCCCGCCCGC | 34 |
| 7103 | CGTCCGCCCTCCCGCCCGCG | 35 |
| 7104 | GTCCGCCCTCCCGCCCGCGG | 36 |
| 7105 | TCCGCCCTCCCGCCCGCGGC | 37 |
| 7106 | CCGCCCTCCCGCCCGCGGCT | 38 |
| 7107 | CGCCCTCCCGCCCGCGGCTC | 39 |
| 7108 | GCCCTCCCGCCCGCGGCTCC | 40 |
| 7109 | CCCTCCCGCCCGCGGCTCCG | 41 |
| 7110 | CCTCCCGCCCGCGGCTCCGC | 42 |
| 7111 | CTCCCGCCCGCGGCTCCGCT | 43 |
| 7112 | TCCCGCCCGCGGCTCCGCTC | 44 |
| 7113 | CCCGCCCGCGGCTCCGCTCA | 45 |
| 7114 | CCGCCCGCGGCTCCGCTCAG | 46 |
| 7115 | CGCCCGCGGCTCCGCTCAGC | 47 |
| 7116 | GCCCGCGGCTCCGCTCAGCG | 48 |
| 7117 | CCCGCGGCTCCGCTCAGCGT | 49 |
| 7118 | CCGCGGCTCCGCTCAGCGTC | 50 |
| 7119 | CGCGGCTCCGCTCAGCGTCC | 51 |
| 7120 | GCGGCTCCGCTCAGCGTCCG | 52 |
| 7121 | CGGCTCCGCTCAGCGTCCGA | 53 |
| 7122 | GGCTCCGCTCAGCGTCCGAC | 54 |
| 7123 | GCTCCGCTCAGCGTCCGACC | 55 |
| 7124 | CTCCGCTCAGCGTCCGACCC | 56 |
| 7125 | TCCGCTCAGCGTCCGACCCA | 57 |
| 7126 | CCGCTCAGCGTCCGACCCAG | 58 |
| 7127 | CGCTCAGCGTCCGACCCAGG | 59 |
| 7128 | GCTCAGCGTCCGACCCAGGG | 60 |
| 7129 | CTCAGCGTCCGACCCAGGGG | 61 |
| 7130 | TCAGCGTCCGACCCAGGGGG | 62 |
| 7131 | CAGCGTCCGACCCAGGGGGG | 63 |
| 7132 | AGCGTCCGACCCAGGGGGGA | 64 |
| 7133 | GCGTCCGACCCAGGGGGGAG | 65 |
| 7134 | CGTCCGACCCAGGGGGGAGG | 66 |
| 7135 | TCGCCTCCCGTCCCTACCGT | 6 |
| 7136 | CTCGCCTCCCGTCCCTACCG | 5 |
| 7137 | GCTCGCCTCCCGTCCCTACC | 4 |
| 7138 | TGCTCGCCTCCCGTCCCTAC | 3 |
| 7139 | TTGCTCGCCTCCCGTCCCTA | 2 |
| 7140 | CTTGCTCGCCTCCCGTCCCT | 1 |
| 7141 | CGGTCCGTCCGCCCTCCCGCCCGCGG | 30 |
| 7142 | GGTCCGTCCGCCCTCCCGCC | 31 |
| 7143 | GTCCGTCCGCCCTCCCGCCC | 32 |
| 7144 | TCCGTCCGCCCTCCCGCCCG | 33 |
| 7145 | CCGTCCGCCCTCCCGCCCGC | 34 |
| 7146 | CGTCCGCCCTCCCGCCCGCG | 35 |
| 7147 | GTCCGCCCTCCCGCCCGCGG | 36 |
| 7148 | TCCGCCCTCCCGCCCGCGGC | 37 |
| 7149 | CCGCCCTCCCGCCCGCGGCT | 38 |
| 7150 | CGCCCTCCCGCCCGCGGCTC | 39 |
| 7151 | GCCCTCCCGCCCGCGGCTCC | 40 |
| 7152 | CCCTCCCGCCCGCGGCTCCG | 41 |
| 7153 | CCTCCCGCCCGCGGCTCCGC | 42 |
| 7154 | CTCCCGCCCGCGGCTCCGCT | 43 |
| 7155 | TCCCGCCCGCGGCTCCGCTC | 44 |
| 7156 | CCCGCCCGCGGCTCCGCTCA | 45 |
| 7157 | CCGCCCGCGGCTCCGCTCAG | 46 |
| 7158 | CGCCCGCGGCTCCGCTCAGC | 47 |
| 7159 | GCCCGCGGCTCCGCTCAGCG | 48 |
| 7160 | CCCGCGGCTCCGCTCAGCGT | 49 |
| 7161 | CCGCGGCTCCGCTCAGCGTC | 50 |
| 7162 | CGCGGCTCCGCTCAGCGTCC | 51 |
| 7163 | GCGGCTCCGCTCAGCGTCCG | 52 |
| 7164 | CGGCTCCGCTCAGCGTCCGA | 53 |
| 7165 | GGCTCCGCTCAGCGTCCGAC | 54 |
| 7166 | GCTCCGCTCAGCGTCCGACC | 55 |
| 7167 | CTCCGCTCAGCGTCCGACCC | 56 |
| 7168 | TCCGCTCAGCGTCCGACCCA | 57 |
| 7169 | CCGCTCAGCGTCCGACCCAG | 58 |
| 7170 | CGCTCAGCGTCCGACCCAGG | 59 |
| 7171 | GCTCAGCGTCCGACCCAGGG | 60 |
| 7172 | CTCAGCGTCCGACCCAGGGG | 61 |
| 7173 | TCAGCGTCCGACCCAGGGGG | 62 |
| 7174 | CAGCGTCCGACCCAGGGGGG | 63 |
| 7175 | AGCGTCCGACCCAGGGGGGA | 64 |
| 7176 | GCGTCCGACCCAGGGGGGAG | 65 |
| 7177 | CGTCCGACCCAGGGGGGAGG | 66 |
| 7178 | TCGGTCCGTCCGCCCTCCCG | 29 |
| 7179 | GTCGGTCCGTCCGCCCTCCC | 28 |
| 7180 | AGTCGGTCCGTCCGCCCTCC | 27 |
| 7181 | CAGTCGGTCCGTCCGCCCTC | 26 |
| 7182 | TCAGTCGGTCCGTCCGCCCT | 25 |
| 7183 | GTCAGTCGGTCCGTCCGCCC | 24 |
| 7184 | CGTCAGTCGGTCCGTCCGCC | 23 |
| 7185 | CCGTCAGTCGGTCCGTCCGC | 22 |
| 7186 | ACCGTCAGTCGGTCCGTCCG | 21 |
| 7187 | TACCGTCAGTCGGTCCGTCC | 20 |
| 7188 | CTACCGTCAGTCGGTCCGTC | 19 |
| 7189 | CCTACCGTCAGTCGGTCCGT | 18 |
| 7190 | CCCTACCGTCAGTCGGTCCG | 17 |
| 7191 | TCCCTACCGTCAGTCGGTCC | 16 |
| 7192 | GTCCCTACCGTCAGTCGGTC | 15 |
| 7193 | CGTCCCTACCGTCAGTCGGT | 14 |
| 7194 | CCGTCCCTACCGTCAGTCGG | 13 |
| 7195 | CCCGTCCCTACCGTCAGTCG | 12 |
| 7196 | TCCCGTCCCTACCGTCAGTC | 11 |
| 7197 | CTCCCGTCCCTACCGTCAGT | 10 |
| 7198 | CCTCCCGTCCCTACCGTCAG | 9 |
| 7199 | GCCTCCCGTCCCTACCGTCA | 8 |
| 7200 | CGCCTCCCGTCCCTACCGTC | 7 |
| 7201 | TCGCCTCCCGTCCCTACCGT | 6 |
| 7202 | CTCGCCTCCCGTCCCTACCG | 5 |
| 7203 | GCTCGCCTCCCGTCCCTACC | 4 |
| 7204 | TGCTCGCCTCCCGTCCCTAC | 3 |
| 7205 | TTGCTCGCCTCCCGTCCCTA | 2 |
| 7206 | CTTGCTCGCCTCCCGTCCCT | 1 |
| 7207 | CGCCAACTTGTGGTCCTACAGTCAACAAG | 1740 |
| 7208 | CCGCCAACTTGTGGTCCTAC | 1739 |
| 7209 | GCCGCCAACTTGTGGTCCTA | 1738 |
| 7210 | AGCCGCCAACTTGTGGTCCT | 1737 |
| 7211 | TAGCCGCCAACTTGTGGTCC | 1736 |
| 7212 | TTAGCCGCCAACTTGTGGTC | 1735 |
| 7213 | GTTAGCCGCCAACTTGTGGT | 1734 |
| 7214 | AGTTAGCCGCCAACTTGTGG | 1733 |
| 7215 | AAGTTAGCCGCCAACTTGTG | 1732 |
| 7216 | TAAGTTAGCCGCCAACTTGT | 1731 |
| 7217 | CTAAGTTAGCCGCCAACTTG | 1730 |
| 7218 | TCTAAGTTAGCCGCCAACTT | 1729 |
| 7219 | CTCTAAGTTAGCCGCCAACT | 1728 |
| 7220 | GCTCTAAGTTAGCCGCCAAC | 1727 |
| 7221 | TGCTCTAAGTTAGCCGCCAA | 1726 |
| 7222 | TTGCTCTAAGTTAGCCGCCA | 1725 |
| 7223 | ATTGCTCTAAGTTAGCCGCC | 1724 |
| 7224 | CATTGCTCTAAGTTAGCCGC | 1723 |
| 7225 | ACATTGCTCTAAGTTAGCCG | 1722 |
| 7226 | CGCAGACACGGGCCCGGAACTCGG | 173 |
| 7227 | GCAGACACGGGCCCGGAACT | 174 |
| 7228 | CAGACACGGGCCCGGAACTC | 175 |
| 7229 | AGACACGGGCCCGGAACTCG | 176 |
| 7230 | GACACGGGCCCGGAACTCGG | 177 |
| 7231 | ACACGGGCCCGGAACTCGGC | 178 |
| 7232 | CACGGGCCCGGAACTCGGCA | 179 |
| 7233 | ACGGGCCCGGAACTCGGCAG | 180 |
| 7234 | CGGGCCCGGAACTCGGCAGG | 181 |
| 7235 | GGGCCCGGAACTCGGCAGGG | 182 |
| 7236 | GGCCCGGAACTCGGCAGGGG | 183 |
| 7237 | GCCCGGAACTCGGCAGGGGG | 184 |
| 7238 | CCCGGAACTCGGCAGGGGGC | 185 |
| 7239 | CCGGAACTCGGCAGGGGGCA | 186 |
| 7240 | GCGCAGACACGGGCCCGGAA | 172 |
| 7241 | TGCGCAGACACGGGCCCGGA | 171 |
| 7242 | TTGCGCAGACACGGGCCCGG | 170 |
| 7243 | CTTGCGCAGACACGGGCCCG | 169 |
| 7244 | GCTTGCGCAGACACGGGCCC | 168 |
| 7245 | AGCTTGCGCAGACACGGGCC | 167 |
| 7246 | CAGCTTGCGCAGACACGGGC | 166 |
| 7247 | TCAGCTTGCGCAGACACGGG | 165 |
| 7248 | ATCAGCTTGCGCAGACACGG | 164 |
| 7249 | AATCAGCTTGCGCAGACACG | 163 |
| 7250 | CAATCAGCTTGCGCAGACAC | 162 |
| 7251 | CCAATCAGCTTGCGCAGACA | 161 |
| 7252 | GCCAATCAGCTTGCGCAGAC | 160 |
| 7253 | AGCCAATCAGCTTGCGCAGA | 159 |
| 7254 | CAGCCAATCAGCTTGCGCAG | 158 |
| 7255 | CCAGCCAATCAGCTTGCGCA | 157 |
| 7256 | TCCAGCCAATCAGCTTGCGC | 156 |
| 7257 | CTCCAGCCAATCAGCTTGCG | 155 |
| 7258 | CGCCCGGCCTAGGAGGGCAGGTTTCTC | 1252 |
| 7259 | GCCCGGCCTAGGAGGGCAGG | 1253 |
| 7260 | CCCGGCCTAGGAGGGCAGGT | 1254 |
| 7261 | CCGGCCTAGGAGGGCAGGTT | 1255 |
| 7262 | CGGCCTAGGAGGGCAGGTTT | 1256 |
| 7263 | GCGCCCGGCCTAGGAGGGCA | 1251 |
| 7264 | AGCGCCCGGCCTAGGAGGGC | 1250 |
| 7265 | CAGCGCCCGGCCTAGGAGGG | 1249 |
| 7266 | ACAGCGCCCGGCCTAGGAGG | 1248 |
| 7267 | CACAGCGCCCGGCCTAGGAG | 1247 |
| 7268 | CCACAGCGCCCGGCCTAGGA | 1246 |
| 7269 | GCCACAGCGCCCGGCCTAGG | 1245 |
| 7270 | AGCCACAGCGCCCGGCCTAG | 1244 |
| 7271 | GAGCCACAGCGCCCGGCCTA | 1243 |
| 7272 | TGAGCCACAGCGCCCGGCCT | 1242 |
| 7273 | GTGAGCCACAGCGCCCGGCC | 1241 |
| 7274 | CGTGAGCCACAGCGCCCGGC | 1240 |
| 7275 | GCGTGAGCCACAGCGCCCGG | 1239 |
| 7276 | GGCGTGAGCCACAGCGCCCG | 1238 |
| 7277 | GGGCGTGAGCCACAGCGCCC | 1237 |
| 7278 | CGGGCGTGAGCCACAGCGCC | 1236 |
| 7279 | ACGGGCGTGAGCCACAGCGC | 1235 |
| 7280 | TACGGGCGTGAGCCACAGCG | 1234 |
| 7281 | TTACGGGCGTGAGCCACAGC | 1233 |
| 7282 | ATTACGGGCGTGAGCCACAG | 1232 |
| 7283 | GATTACGGGCGTGAGCCACA | 1231 |
| 7284 | AGATTACGGGCGTGAGCCAC | 1230 |
| 7285 | GAGATTACGGGCGTGAGCCA | 1229 |
| 7286 | TGAGATTACGGGCGTGAGCC | 1228 |
| 7287 | CTGAGATTACGGGCGTGAGC | 1227 |
| 7288 | GCTGAGATTACGGGCGTGAG | 1226 |
| 7289 | TGCTGAGATTACGGGCGTGA | 1225 |
| 7290 | ATGCTGAGATTACGGGCGTG | 1224 |
| 7291 | TATGCTGAGATTACGGGCGT | 1223 |
| 7292 | ATATGCTGAGATTACGGGCG | 1222 |
| 7293 | AATATGCTGAGATTACGGGC | 1221 |
| 7294 | CAATATGCTGAGATTACGGG | 1220 |
| 7295 | CCAATATGCTGAGATTACGG | 1219 |
| 7296 | CCCAATATGCTGAGATTACG | 1218 |

```
Hot Zones (Relative upstream location to gene start site)
  1-650
  850-1300
1700-2050
2250-2550
2800-3700
4350-5000
```

### Examples

Genetic Code (5′ Upstream Region)

(SEQ ID NO: 11976)

CCAGGCTGATCTCAAACTCCTAAGCTCAAGTGATCCATGTTCCTCAGCCT
CCCAAAGTGCTGGGATTATAGGCGTGAGCCATAGCGTCCAGCCCTGACTT
ACATTTTAAAAGGATGGCTCTTGCTGCTGTCTTGAAAATAGACTGAGTTA
GTCAGTTTATAAAACTGGGGAGATTTTGCATAAAACTCCAGATTTCTGCC
TTCTCTTGAAAAATAGGGGCTAGGTGCGTTGGCTCACTCCTATAATCCCA
GCATTTTGGAAGGCCAAGGTGGGCAGATTGCTTGAGCCCAGGAGTTTAAG
ACCAGACTGGACAACATGGCAAAACCCTGTCTCTACCAAAAAAAAAAAAA
AATTAGCAGGGTGTGGTGGTGCACACCTGCAGTCCCAGCTACTCAGGAGG
CAAGCTTGTATTCCTAGCTACTTAGGAGGATAGTTTGAGCCCAGGAAGTC
AAGGCTGCAGTGAGCATGATCCTGCCATTGCACTCCAGCCAGAGCAAAAA
AGAGAGCGAAACCCCATCTCAAAAAAAAGGGAAGATTTAGCTATGTTGGA
CTTACCTGTCCTCATGGAGCTGAATAATGGCCACCCCTCCAGGTAGGGCC
TGAACTCTACCTTTGCCAGAGTCCCCTCCACTCCCTGTTGGTCTTAGACA
ATGAAACTGAGTGTTAGTAGCTATTTACCACCAAGCTCATGCTTGTTGTT
CTTATAATAAAGATAAATGGTTTAATAAATGGTATGATAAAGAAAATTAT
ATTATGGTATTATACCATTTAATAAATGGTATAATAAAGAAAATGGTTTT
TTGCACCCACATTTCCATTAAAAAGTGAGAAAATTAAAGATACCTGAGGA
TGGCAGAGTGTTTGATGAAAGATAGGGAAATGTTGGCCAGGCACCGTGGC
TCACACCTGTAATCCCAGCAGTTTAGGAGGCCGGGGCAGGCGGATCACAA
GGTCAGGAGTTCAAGATCAGCCTGGCCAACATAGTGAAACCCCGTCTCTA
CTAAAAATACAAAAAATTAGCCGGGAGTGGTGGCAGGTGCCTACAATCCC
AGCTACTCGGAAGGCTGAATGGCGCGATCTCAGCTCATTGCAACCTCTGC
CTCCCAGGTTCAAGCCATTCTTCTGCCTTAGCCTCCCTAGTAGCTGGGAT
TACAGGCGCCTGCCACCATGCCTAGCTAATTTTTATATTTTTAGTAGACG
TGGGGTTTCGCCATGTTGGCCAGGCTGGTCTCAAACTCCTGACCTTGGGT
GATCTGCCCGCCTCGGTCTCCCAAACTGCTGGGATTACAGGAGTGAGCCA
CAGTGCCCGGCCTCTAATTTTTATTTTTAATTTTTTTAATTTTTATTTTT
TTAATTTTTATTTTATTTATTTTTTGTAATTTTTAAAATATACAAAAAAA
GGGCCGGGTGTGGTGGCTCACGCCTGTAATCCCAGCACTTTTTGGGAGGC
TGAGGTGGGTGGATCACGAGGTCAGGAGATCGAGACCATCCTGGCTAACA
TGGTGAAACCCTGTCTCTACTAAAAATATAAAAAAATTAGCCGGGCCTGG
TGGCAGGTGCCTGTAGTCCCAGCTACTCGGGAGGCTGAGACAGGAGAATG
GCGTGAACTCGAGAGGTGGAGCTTGCAGTGAGCCAAGATCGCACCACTAC
ACTCCAGCCTGGGCGACAGAGTGAGACTTCATCTCAAAAAAAAAAAAAAT
TATATATATATATATACATATATATATGCAAACAAAGAGCATCTGAGTCA
TAATAATGTAAATCTATCACCTGACTGACCTGCTGCCACACCTCATGATC
TCATCTGATCCCCACACTCCTTCTCTTTGGGATACTGTGTACAGCCATAG
CGTGGGTGAACTTTGTATTCCTATCCTCCCCATTTTTGTTATTTTATTTT
ATTTCTTATTTATTTGAGACAGAGTCTCACTCTGTCATCCAGACTGTAAT
GCAGTGGCCTGATCTCGGCTCACTGCAACCTCCACCTCCCGGTTTCAAGC
GAATCTCCTGCCTCAGCCTCCTAAGTAGCTGGGACCTACAGGCACACACC
ACCACGCCCAGCTAATTTTTGCATTTTTAATAGAGACGGGGTTTCACCGT
GCTGGGCAGGCTGGTCTCGAACTCCTGACCTCAGGTGATTTGCCCACCTC
AGCCTTCCAAATTGTTAGGATTACAGGCATGAGTCACTGTGCCCGGCCTC
CTCCCCATTTTATAACAAGGGAAATGGAGGCCCAGAATGGTTAAGTAAAC
CCACCCAGGGCTAGCTGAGAATTAGCAACAGAGAACTGGGAGTAGAATTT
GTTCCCTGGCCCTTTGCTGTTTCTATTATAAGCCACCCAGTCTTAGATTT
TCTGTTACCTTATAATTAATGACTCAAATGCAGTTTCTGAGTGAGAAACA
CAAGTCCCAAACACTCTTTAAAGAGGCATAAAGATGTATCTTGTTGTTTT
CTTTTGTTTGAGACAAGGCCTGGCTCTATTGCCCAGGCTGGAGTGTGGTG
ACATGATCTTGGCTCACTGCAACATCTGTCTCCTGGGCTCAAGCCATCAT
CCCACCTCAGCCTCCTGAGTAGCTGGAACTACAGGAGCGCGCCCCCACAC
CTGGGTAATTTTTCTATTTTTTGTAGAGATGGGGTTTTGCCATGTTGCCC
AGGCTGGTCTCGAACTCCTGAGCTCAAGTGATCCACCCATCTTGGCCTCC
CAAAGTGCTGGGATTACAGGCGTGAGCCACTGTGCCCAGCCTCTTGTTGA
CTGTAGGACCACAAGTTGGCGGCTAACTTAGAGCAATGTTTGGCACACAG
GAAGCACTCATTAAATATTGACATTATTGTAGTTATTTTAATAGCCCAGC
ATTGCACTTTTAGGTCTTTCAGCTTTCAGTGATGATCAGTTGATAATTGA
TGATCTGGTGGAGTGGTTCTTAATGGTAGAGTTGGGGGCAATTTTACACT
CCCTTACACCCCACTAATCTTCCCCCCAACCCAATGGTAAAGCTATTGCA
CAGTACTTGGCAATGTCTAGAGACAATTTTGGTTGTCACAGCCTGGGGGG
AAGGTGCTACTGGCATCTAGTGGGTAGAGGCTAAGGATGCTGCTTAATTT
TTTTTTTTTTTGAGACAAGAGTTTCACTCTAGTTGCCCAGGCACAGAACA
GCTTCACAGAAGCTGTTAATGCACAGAATAGCTTCCTACAAAAAAGCATT
ACCTGGCCCAAAATGTCATTAGCTACCAGGCTGAGAAACCTGCCCTCCTA
GGCCGGGCGCTGTGGCTCACGCCCGTAATCTCAGCATATTGGGAGGCCGA
GGTGGGCGGATCCTGAGGTCAGGAGTTCGAGACCACCTGGACCAACACGG
AGAAACCCAGTCTCTACCAAAAATACAAAATTAGCCGGGCATGGTGGCAC
ATGCTTGTAATCCCAGCTACTCGGGAGGCTGAGGCAGGAGAACCGCTTGA
ACACAGAGGCAGAGATTGTGGTGAGCCGAGATCACACCATTGCACTCCAG
CCTGGGCAACTAGAGCGAAACTCTTGTCTCAAAAAAAAAAAAAAAAAAAA
AAACAGGGAAAGAAAAGAAAGGAAACCTGCCCTCCTATCATAGGATAATC
CCATTTCCTCCTGTCTAAAGAGACGCCTACTTAGTCATCCTGGGTGACTG
CATCAGGGAGGTAGATTTTGGAGTCTGAAAGGCTGGGTTCTGTCACTTTG
TTACAGTGCCTCTGGTGCAAAGAAAGCATTTTAAAAACCCTGTACAATTA
AAAAATTGAATTTAATTACTTTGTGTAACTTTGAATAATTCACAGAAGTC
TGAACTTCTTTATCCTGTCCTGTAAAATGGAGGTAAAAAGCCCTTGGCCG
AGAGCTGTTTTGAGGAAAAACTGAAATAACATTGGTAAAGTGTCGCACAG
TACTTGGCACACAGCAGCCCCTCGACAAACATTAGCTTTCTTTCCCTTTC
TTGTCGGTTTCTTCCTCTCCAAACCCGCGTGTTGCTTTTCTTTTTAATTA
TTTTTCTGTAGCCCTCCTTTGCGGCCACAAACTCGCTTTCTAACCCAGGT
TCAGCCCTTTTATTGGCTGAGTGACCTTGTGCAAGTCACTTTTCCCCTGT
AGGCCTCGGTTTATTCTCCGTAAAATCAGAAAGTTGGCCTCCGATCTCCA
AGCACGCTTTTCACGACGAAGTGGGACTGTTAAGTTTACAGAGCTGCTTT
CCTCCCCCGGGACTGATGGTACGGTCCCCGGGCGGCTCCCCACCCATCTG
TCGCAGACCTTGGTACAGGCCCAGGGGGCCCTCGGCGGCCTCTCCGGGCT
GCCCTTGCCCCCTGCCGAGTTCCGGGCCCGTGTCTGCGCAAGCTGATTGG
CTGGAGCGGTGCCCGGGCTGCGCGGCTATAGGTGAGCCCAGGAGGGGACG
GGCGGGGCGGGCCGGAGGCCCGCCCCCTCCCCCCTGGGTCGGACGCTGAG
CGGAGCCGCGGGCGGGAGGGCGGACGGACCGACTGACGGTAGGGACGGGA
GGCGAGCAAGATG

[0410] 28. PD-1. Programmed cell death protein 1 (PD-1) is also known as CD279 (cluster of differentiation 279). This gene encodes a cell surface membrane protein of the immunoglobulin superfamily. This protein is expressed in pro-B cells and is thought to play a role in their differentiation. PD-1 has two ligands, PD-L1 and PD-L2. PD-L1 protein is upregulated on macrophages and dendritic cells (DC) in response to LPS and GM-CSF treatment, and on T cells and B cells upon TCR and B cell receptor signaling.

[0411] Monoclonal antibodies blocking PD-1 may overcome immune resistance and boost the immune system are being developed for the treatment of cancer (Weber 2010, Semin. Oncol. 37 (5): 430-9). Nivolumab, a representative antibody, produced complete or partial responses in non-small-cell lung cancer, melanoma, and renal-cell cancer, in a clinical trial with a total of 296 patients; colon and pancreatic cancer did not have a response (Topalian et al., 2012: N Engl J Med 2012; 366:2443-2454). In HIV, drugs targeting PD-1 may augment immune responses and/or facilitate HIV eradication.

[0412] Protein: PD-1 Gene: PDCD1 (Homo sapiens, chromosome 2, 242792033-242801058 [NCBI Reference Sequence: NC_{—}000002.11]; start site location: 242800990; strand: negative)

Gene Identification

| | |
|---|---|
| GeneID | 5133 |
| HGNC | 8760 |
| HPRD | 02590 |
| MIM | 600244 |

Targeted Sequences

| | | Relative |
|---|---|---|
| | | upstream |
| | | location |
| | | to gene |
| Sequence | | start |
| ID No: | Sequence (5′-3′) | site |
| 7297 | TGCCGCCTTCTCCACTGCTCAGGCG | 23 |
| 7316 | ACCGCCTGACAGCTGGCGCGGCTGCCTGGC | 1061 |
| 7379 | CTGCGAGGCGCGGCCACGGCG | 1171 |
| 7396 | CGAGGAGGAAAGGCAGGCGGAGTCCG | 3395 |
| 7397 | CAGCGAAGCTGCAGAACGTCCCCATCACCACG | 4268 |
| 7439 | CGACAGCCGTGGGAAGGTGCAGTACG | 4388 |
| 7440 | CGGGATTCCCTGGAGATGCCTCCAGCGCG | 4422 |
| 7466 | AGGCGGTCCCAGGGCTCAGGTGTGGG | 2229 |
| 7498 | GCGTGCACCCCGTGGCCAGCTC | 3813 |
| 7526 | CAACGTACACGCAATCCACAAC | 2832 |

Target Shift Sequences

| | | Relative |
|---|---|---|
| | | upstream |
| | | location |
| | | to gene |
| Sequence | | start |
| ID No: | Sequence (5′-3′) | site |
| 7297 | TGCCGCCTTCTCCACTGCTCAGGCG | 23 |
| 7298 | GCCGCCTTCTCCACTGCTCA | 24 |
| 7299 | CCGCCTTCTCCACTGCTCAG | 25 |
| 7300 | CGCCTTCTCCACTGCTCAGG | 26 |
| 7301 | GTGCCGCCTTCTCCACTGCT | 22 |
| 7302 | AGTGCCGCCTTCTCCACTGC | 21 |
| 7303 | GAGTGCCGCCTTCTCCACTG | 20 |
| 7304 | AGAGTGCCGCCTTCTCCACT | 19 |
| 7305 | CAGAGTGCCGCCTTCTCCAC | 18 |
| 7306 | CCAGAGTGCCGCCTTCTCCA | 17 |
| 7307 | ACCAGAGTGCCGCCTTCTCC | 16 |
| 7308 | CACCAGAGTGCCGCCTTCTC | 15 |
| 7309 | CCACCAGAGTGCCGCCTTCT | 14 |
| 7310 | CCCACCAGAGTGCCGCCTTC | 13 |
| 7311 | CCCCACCAGAGTGCCGCCTT | 12 |
| 7312 | GCCCCACCAGAGTGCCGCCT | 11 |
| 7313 | AGCCCCACCAGAGTGCCGCC | 10 |
| 7314 | CAGCCCCACCAGAGTGCCGC | 9 |
| 7315 | GCAGCCCCACCAGAGTGCCG | 8 |
| 7316 | ACCGCCTGACAGCTGGCGCGGCTGCCTGGC | 1061 |
| 7317 | CCGCCTGACAGCTGGCGCGG | 1062 |
| 7318 | CGCCTGACAGCTGGCGCGGC | 1063 |
| 7319 | GCCTGACAGCTGGCGCGGCT | 1064 |
| 7320 | CCTGACAGCTGGCGCGGCTG | 1065 |
| 7321 | CTGACAGCTGGCGCGGCTGC | 1066 |
| 7322 | TGACAGCTGGCGCGGCTGCC | 1067 |
| 7323 | GACAGCTGGCGCGGCTGCCT | 1068 |
| 7324 | ACAGCTGGCGCGGCTGCCTG | 1069 |
| 7325 | CAGCTGGCGCGGCTGCCTGG | 1070 |
| 7326 | AGCTGGCGCGGCTGCCTGGC | 1071 |
| 7327 | GCTGGCGCGGCTGCCTGGCT | 1072 |
| 7328 | CTGGCGCGGCTGCCTGGCTC | 1073 |
| 7329 | TGGCGCGGCTGCCTGGCTCC | 1074 |
| 7330 | GGCGCGGCTGCCTGGCTCCG | 1075 |
| 7331 | GCGCGGCTGCCTGGCTCCGA | 1076 |
| 7332 | CGCGGCTGCCTGGCTCCGAG | 1077 |
| 7333 | GCGGCTGCCTGGCTCCGAGA | 1078 |
| 7334 | CGGCTGCCTGGCTCCGAGAG | 1079 |
| 7335 | GGCTGCCTGGCTCCGAGAGA | 1080 |
| 7336 | GCTGCCTGGCTCCGAGAGAC | 1081 |
| 7337 | CTGCCTGGCTCCGAGAGACA | 1082 |
| 7338 | TGCCTGGCTCCGAGAGACAC | 1083 |
| 7339 | GCCTGGCTCCGAGAGACACT | 1084 |
| 7340 | CCTGGCTCCGAGAGACACTC | 1085 |
| 7341 | CTGGCTCCGAGAGACACTCG | 1086 |
| 7342 | TGGCTCCGAGAGACACTCGG | 1087 |
| 7343 | GGCTCCGAGAGACACTCGGC | 1088 |
| 7344 | GCTCCGAGAGACACTCGGCC | 1089 |
| 7345 | CTCCGAGAGACACTCGGCCC | 1090 |
| 7346 | TCCGAGAGACACTCGGCCCG | 1091 |
| 7347 | CCGAGAGACACTCGGCCCGG | 1092 |
| 7348 | CGAGAGACACTCGGCCCGGC | 1093 |
| 7349 | GAGAGACACTCGGCCCGGCT | 1094 |
| 7350 | AGAGACACTCGGCCCGGCTC | 1095 |
| 7351 | GAGACACTCGGCCCGGCTCT | 1096 |
| 7352 | AGACACTCGGCCCGGCTCTG | 1097 |
| 7353 | GACACTCGGCCCGGCTCTGA | 1098 |
| 7354 | ACACTCGGCCCGGCTCTGAA | 1099 |
| 7355 | CACTCGGCCCGGCTCTGAAG | 1100 |
| 7356 | ACTCGGCCCGGCTCTGAAGG | 1101 |
| 7357 | CTCGGCCCGGCTCTGAAGGG | 1102 |
| 7358 | TCGGCCCGGCTCTGAAGGGA | 1103 |
| 7359 | CGGCCCGGCTCTGAAGGGAA | 1104 |
| 7360 | GGCCCGGCTCTGAAGGGAAA | 1105 |
| 7361 | GCCCGGCTCTGAAGGGAAAA | 1106 |
| 7362 | CCCGGCTCTGAAGGGAAAAC | 1107 |
| 7363 | CCGGCTCTGAAGGGAAAACA | 1108 |
| 7364 | CGGCTCTGAAGGGAAAACAT | 1109 |
| 7365 | AACCGCCTGACAGCTGGCGC | 1060 |
| 7366 | AAACCGCCTGACAGCTGGCG | 1059 |
| 7367 | GAAACCGCCTGACAGCTGGC | 1058 |
| 7368 | AGAAACCGCCTGACAGCTGG | 1057 |
| 7369 | TAGAAACCGCCTGACAGCTG | 1056 |
| 7370 | CTAGAAACCGCCTGACAGCT | 1055 |
| 7371 | GCTAGAAACCGCCTGACAGC | 1054 |
| 7372 | GGCTAGAAACCGCCTGACAG | 1053 |
| 7373 | AGGCTAGAAACCGCCTGACA | 1052 |
| 7374 | GAGGCTAGAAACCGCCTGAC | 1051 |
| 7375 | CGAGGCTAGAAACCGCCTGA | 1050 |
| 7376 | GCGAGGCTAGAAACCGCCTG | 1049 |
| 7377 | AGCGAGGCTAGAAACCGCCT | 1048 |
| 7378 | AAGCGAGGCTAGAAACCGCC | 1047 |
| 7379 | CTGCGAGGCGCGGCCACGGCG | 1171 |
| 7380 | TGCGAGGCGCGGCCACGGCG | 1172 |
| 7381 | GCGAGGCGCGGCCACGGCGA | 1173 |
| 7382 | CGAGGCGCGGCCACGGCGAG | 1174 |
| 7383 | TCTGCGAGGCGCGGCCACGG | 1170 |
| 7384 | GTCTGCGAGGCGCGGCCACG | 1169 |
| 7385 | TGTCTGCGAGGCGCGGCCAC | 1168 |
| 7386 | ATGTCTGCGAGGCGCGGCCA | 1167 |
| 7387 | GATGTCTGCGAGGCGCGGCC | 1166 |
| 7388 | TGATGTCTGCGAGGCGCGGC | 1165 |
| 7389 | ATGATGTCTGCGAGGCGCGG | 1164 |
| 7390 | GATGATGTCTGCGAGGCGCG | 1163 |
| 7391 | AGATGATGTCTGCGAGGCGC | 1162 |
| 7392 | AAGATGATGTCTGCGAGGCG | 1161 |
| 7393 | AAAGATGATGTCTGCGAGGC | 1160 |
| 7394 | CAAAGATGATGTCTGCGAGG | 1159 |
| 7395 | TCAAAGATGATGTCTGCGAG | 1158 |
| 7396 | CGAGGAGGAAAGGCAGGCGGAGTCCG | 3395 |
| 7397 | CAGCGAAGCTGCAGAACGTCCCCATCACCACG | 4268 |
| 7398 | AGCGAAGCTGCAGAACGTCC | 4269 |
| 7399 | GCGAAGCTGCAGAACGTCCC | 4270 |
| 7400 | CGAAGCTGCAGAACGTCCCC | 4271 |
| 7401 | GAAGCTGCAGAACGTCCCCA | 4272 |
| 7402 | AAGCTGCAGAACGTCCCCAT | 4273 |
| 7403 | AGCTGCAGAACGTCCCCATC | 4274 |
| 7404 | GCTGCAGAACGTCCCCATCA | 4275 |
| 7405 | CTGCAGAACGTCCCCATCAC | 4276 |
| 7406 | TGCAGAACGTCCCCATCACC | 4277 |
| 7407 | GCAGAACGTCCCCATCACCA | 4278 |
| 7408 | CAGAACGTCCCCATCACCAC | 4279 |
| 7409 | AGAACGTCCCCATCACCACG | 4280 |
| 7410 | GAACGTCCCCATCACCACGG | 4281 |
| 7411 | AACGTCCCCATCACCACGGG | 4282 |
| 7412 | ACGTCCCCATCACCACGGGG | 4283 |
| 7413 | CGTCCCCATCACCACGGGGT | 4284 |
| 7414 | GTCCCCATCACCACGGGGTC | 4285 |
| 7415 | TCCCCATCACCACGGGGTCC | 4286 |
| 7416 | CCCCATCACCACGGGGTCCT | 4287 |
| 7417 | CCCATCACCACGGGGTCCTC | 4288 |
| 7418 | CCATCACCACGGGGTCCTCC | 4289 |
| 7419 | CATCACCACGGGGTCCTCCG | 4290 |
| 7420 | ATCACCACGGGGTCCTCCGG | 4291 |
| 7421 | TCACCACGGGGTCCTCCGGG | 4292 |
| 7422 | CACCACGGGGTCCTCCGGGT | 4293 |
| 7423 | ACCACGGGGTCCTCCGGGTG | 4294 |
| 7424 | CCACGGGGTCCTCCGGGTGC | 4295 |
| 7425 | CACGGGGTCCTCCGGGTGCC | 4296 |
| 7426 | ACGGGGTCCTCCGGGTGCCC | 4297 |
| 7427 | CGGGGTCCTCCGGGTGCCCT | 4298 |
| 7428 | GGGGTCCTCCGGGTGCCCTT | 4299 |
| 7429 | GGGTCCTCCGGGTGCCCTTG | 4300 |
| 7430 | GGTCCTCCGGGTGCCCTTGG | 4301 |
| 7431 | GTCCTCCGGGTGCCCTTGGC | 4302 |
| 7432 | TCCTCCGGGTGCCCTTGGCA | 4303 |
| 7433 | CCTCCGGGTGCCCTTGGCAA | 4304 |
| 7434 | CTCCGGGTGCCCTTGGCAAT | 4305 |
| 7435 | TCCGGGTGCCCTTGGCAATA | 4306 |
| 7436 | CCGGGTGCCCTTGGCAATAC | 4307 |
| 7437 | CGGGTGCCCTTGGCAATACA | 4308 |
| 7438 | ACAGCGAAGCTGCAGAACGT | 4267 |
| 7439 | CGACAGCCGTGGGAAGGTGCAGTACG | 4388 |
| 7440 | CGGGATTCCCTGGAGATGCCTCCAGCGCG | 4422 |
| 7441 | CCGGGATTCCCTGGAGATGC | 4421 |
| 7442 | TCCGGGATTCCCTGGAGATG | 4420 |
| 7443 | TTCCGGGATTCCCTGGAGAT | 4419 |
| 7444 | CTTCCGGGATTCCCTGGAGA | 4418 |
| 7445 | CCTTCCGGGATTCCCTGGAG | 4417 |
| 7446 | TCCTTCCGGGATTCCCTGGA | 4416 |
| 7447 | ATCCTTCCGGGATTCCCTGG | 4415 |
| 7448 | CATCCTTCCGGGATTCCCTG | 4414 |
| 7449 | GCATCCTTCCGGGATTCCCT | 4413 |
| 7450 | CGCATCCTTCCGGGATTCCC | 4412 |
| 7451 | ACGCATCCTTCCGGGATTCC | 4411 |
| 7452 | TACGCATCCTTCCGGGATTC | 4410 |
| 7453 | GTACGCATCCTTCCGGGATT | 4409 |
| 7454 | AGTACGCATCCTTCCGGGAT | 4408 |
| 7455 | CAGTACGCATCCTTCCGGGA | 4407 |
| 7456 | GCAGTACGCATCCTTCCGGG | 4406 |
| 7457 | TGCAGTACGCATCCTTCCGG | 4405 |
| 7458 | GTGCAGTACGCATCCTTCCG | 4404 |
| 7459 | GGTGCAGTACGCATCCTTCC | 4403 |
| 7460 | AGGTGCAGTACGCATCCTTC | 4402 |
| 7461 | AAGGTGCAGTACGCATCCTT | 4401 |
| 7462 | GAAGGTGCAGTACGCATCCT | 4400 |
| 7463 | GGAAGGTGCAGTACGCATCC | 4399 |
| 7464 | GGGAAGGTGCAGTACGCATC | 4398 |
| 7465 | TGGGAAGGTGCAGTACGCAT | 4397 |
| 7466 | AGGCGGTCCCAGGGCTCAGGTGTGGG | 2229 |
| 7467 | GGCGGTCCCAGGGCTCAGGT | 2230 |
| 7468 | GCGGTCCCAGGGCTCAGGTG | 2231 |
| 7469 | CGGTCCCAGGGCTCAGGTGT | 2232 |
| 7470 | TAGGCGGTCCCAGGGCTCAG | 2228 |
| 7471 | ATAGGCGGTCCCAGGGCTCA | 2227 |
| 7472 | GATAGGCGGTCCCAGGGCTC | 2226 |
| 7473 | AGATAGGCGGTCCCAGGGCT | 2225 |
| 7474 | CAGATAGGCGGTCCCAGGGC | 2224 |
| 7475 | GCAGATAGGCGGTCCCAGGG | 2223 |
| 7476 | AGCAGATAGGCGGTCCCAGG | 2222 |
| 7477 | AAGCAGATAGGCGGTCCCAG | 2221 |
| 7478 | GAAGCAGATAGGCGGTCCCA | 2220 |
| 7479 | CGAAGCAGATAGGCGGTCCC | 2219 |
| 7480 | CCGAAGCAGATAGGCGGTCC | 2218 |
| 7481 | CCCGAAGCAGATAGGCGGTC | 2217 |
| 7482 | CCCCGAAGCAGATAGGCGGT | 2216 |
| 7483 | ACCCCGAAGCAGATAGGCGG | 2215 |
| 7484 | CACCCCGAAGCAGATAGGCG | 2214 |
| 7485 | CCACCCCGAAGCAGATAGGC | 2213 |
| 7486 | CCCACCCCGAAGCAGATAGG | 2212 |
| 7487 | CCCCACCCCGAAGCAGATAG | 2211 |
| 7488 | ACCCCACCCCGAAGCAGATA | 2210 |
| 7489 | GACCCCACCCCGAAGCAGAT | 2209 |
| 7490 | GGACCCCACCCCGAAGCAGA | 2208 |
| 7491 | GGGACCCCACCCCGAAGCAG | 2207 |
| 7492 | TGGGACCCCACCCCGAAGCA | 2206 |
| 7493 | CTGGGACCCCACCCCGAAGC | 2205 |
| 7494 | CCTGGGACCCCACCCCGAAG | 2204 |
| 7495 | TCCTGGGACCCCACCCCGAA | 2203 |
| 7496 | GTCCTGGGACCCCACCCCGA | 2202 |
| 7497 | GGTCCTGGGACCCCACCCCG | 2201 |
| 7498 | GCGTGCACCCCGTGGCCAGCTC | 3813 |
| 7499 | CGTGCACCCCGTGGCCAGCT | 3814 |
| 7500 | GTGCACCCCGTGGCCAGCTC | 3815 |
| 7501 | TGCACCCCGTGGCCAGCTCA | 3816 |
| 7502 | GCACCCCGTGGCCAGCTCAT | 3817 |
| 7503 | CACCCCGTGGCCAGCTCATA | 3818 |
| 7504 | ACCCCGTGGCCAGCTCATAT | 3819 |
| 7505 | CCCCGTGGCCAGCTCATATC | 3820 |
| 7506 | CCCGTGGCCAGCTCATATCT | 3821 |
| 7507 | CCGTGGCCAGCTCATATCTA | 3822 |
| 7508 | CGTGGCCAGCTCATATCTAA | 3823 |
| 7509 | GGCGTGCACCCCGTGGCCAG | 3812 |
| 7510 | AGGCGTGCACCCCGTGGCCA | 3811 |
| 7511 | CAGGCGTGCACCCCGTGGCC | 3810 |
| 7512 | ACAGGCGTGCACCCCGTGGC | 3809 |
| 7513 | CACAGGCGTGCACCCCGTGG | 3808 |
| 7514 | CCACAGGCGTGCACCCCGTG | 3807 |
| 7515 | ACCACAGGCGTGCACCCCGT | 3806 |
| 7516 | GACCACAGGCGTGCACCCCG | 3805 |
| 7517 | GGACCACAGGCGTGCACCCC | 3804 |
| 7518 | GGGACCACAGGCGTGCACCC | 3803 |
| 7519 | TGGGACCACAGGCGTGCACC | 3802 |
| 7520 | CTGGGACCACAGGCGTGCAC | 3801 |
| 7521 | GCTGGGACCACAGGCGTGCA | 3800 |
| 7522 | AGCTGGGACCACAGGCGTGC | 3799 |
| 7523 | TAGCTGGGACCACAGGCGTG | 3798 |
| 7524 | GTAGCTGGGACCACAGGCGT | 3797 |
| 7525 | AGTAGCTGGGACCACAGGCG | 3796 |
| 7526 | CAACGTACACGCAATCCACAAC | 2832 |
| 7527 | AACGTACACGCAATCCACAA | 2833 |
| 7528 | ACGTACACGCAATCCACAAC | 2834 |
| 7529 | CGTACACGCAATCCACAACA | 2835 |
| 7530 | GTACACGCAATCCACAACAC | 2836 |
| 7531 | TACACGCAATCCACAACACA | 2837 |
| 7532 | ACACGCAATCCACAACACAT | 2838 |
| 7533 | CACGCAATCCACAACACATA | 2839 |
| 7534 | ACGCAATCCACAACACATAC | 2840 |
| 7535 | CGCAATCCACAACACATACA | 2841 |
| 7536 | CCAACGTACACGCAATCCAC | 2831 |
| 7537 | CCCAACGTACACGCAATCCA | 2830 |
| 7538 | CCCCAACGTACACGCAATCC | 2829 |
| 7539 | TCCCCAACGTACACGCAATC | 2828 |
| 7540 | ATCCCCAACGTACACGCAAT | 2827 |
| 7541 | AATCCCCAACGTACACGCAA | 2826 |
| 7542 | CAATCCCCAACGTACACGCA | 2825 |
| 7543 | ACAATCCCCAACGTACACGC | 2824 |
| 7544 | CACAATCCCCAACGTACACG | 2823 |
| 7545 | GCACAATCCCCAACGTACAC | 2822 |
| 7546 | TGCACAATCCCCAACGTACA | 2821 |
| 7547 | ATGCACAATCCCCAACGTAC | 2820 |
| 7548 | CATGCACAATCCCCAACGTA | 2819 |
| 7549 | ACATGCACAATCCCCAACGT | 2818 |
| 7550 | AACATGCACAATCCCCAACG | 2817 |

Hot Zones (Relative upstream location to gene start site)
1-1450
1850-2350
2750-3000
3100-3600
3650-4050
4100-5000

### Examples

[0413] In FIG. 48, In MCF7 (human mammary breast cell line), PD1 (293) produced statistically significant (P<0.05) inhibition at 10 μM compared to the untreated and negative control values. The PD1 sequence PD1 (293) fits the independent and dependent DNAi motif claims.

[0414] The secondary structure for PD1 (293) is shown in FIG. 49.

Genetic Code (5′ Upstream Region)

(SEQ ID NO: 11977)

ACCACAGCCTGGATGGCTCGGCACAGAGAGGAACGGGCTGCTGAAACACA
CGCGCTGGAGGCATCTCCAGGGAATCCCGGAAGGATGCGTACTGCACCTT
CCCACGGCTGTCGCTGGAATGAAACAGTGATGGGGGTGGAGGGCAGGCTC
GTGGCCACCAGCAGGGAGGTGGGTGTATTGCCAAGGGCACCCGGAGGACC
CCGTGGTGATGGGGACGTTCTGCAGCTTCGCTGTCAGGGGATGCAGGAGC
CTTCGCTTGTGCCCACATTGTGCAGCCTTTGATAGGCACACATTAGCCAG
AAACGGGGACTCAGGATGGGATCGAGGTGTCACATCAAAGTCATTAACCT
GGTTGTGACGTTGTCCTGTGGTTTTCCAAACTGTTATCATTCAGAGAGAC
TGAGCAGAGTGTATGAGGAAACATCTGTGTAATTTCTTACAACTGCAAGT
AAATCTACAATTATCTCAATTGTAAATGATACAATACTCAACCAAAACAT
ACAACCATCAGCCAGGTGTGGTGGCTCACGCCTGTAATCCCAACTCTTTG
GGAGTCCAAGGTGGGAGAATTGCTGGAGGCCCGGAGTTTGAGACCAGCCT
GGGTAACATAAAGAGACCTCCTCTGCCCCCACCCCAAATTCTACAAAAAA
AAAAAATGTTAGATATGAGCTGGCCACGGGGTGCACGCCTGTGGTCCCAG
CTACTCAGGAGGCTGAGGTCGGAGGATCGCTTGAGCCCAGGAGGTCGAGG
CTGCAGTGAGCCAAGATCACACCACTGCACTCCAGCCTGGGTGCAGAGCA
AGACCCTGTCTCTAAAAGAAAATAAACAGACAAAAACCACATACAACTTT
GCTTGTTGTAAATTATCTTTTAACTGAATGCCCTGGATTGAATCTGGCTG
CTGCCATCCCAGGGCCAGTGATTTGGATGGGGTATGACCCTCTGTGAGGA
AGGAGCAGGCGGTGGGGGAAGGGCCTGGGTGTCCAGGTTCCCTGGGAAGG
AAGGCTGAGAAAAGGAGATGGGGGAGGGGTGCGCAGGGCCGGCCAGCCAA
GGGCCCCTTAGCCCCATCTACCCTGCTCCCCGGACTCCGCCTGCCTTTCC
TCCTCGTGACAGAAGACAGTGGAAGCCTACTGGGTGGAAGGCACGGGCTT
AGGATGTGTGTGGGAGGAAAGTGTGTGTGCTGGGGAGCATGTATGTTTGG
GAGTTGTGTGTGTTGGAAATCGTGTGTTGGGGATTGTGTGTATATTGCAG
ATTTTGTATGTGTGTTGGGGATTGTGGTGTGTGGGTGTTGTAGATTGCGT
GTTGGGGATTGTGTTGGGGATTGTGTATGTGTTGGGGGTTGTGTGTGTGT
TGGGGATTGTGTGTGGGGGAGATTGTGTGTGTGTGCTGGGGATTGGGTGT
GTTGGGGATTGTGTGTGTGTTGAGGATTGTGTGTGGGGGAGATTCTGTGT
GTGTGCTGGGGATTGGGTGTGTTGGGGATTGTGTGTGTATTGGGAATTGT
GTGTGTGTTGAGGATTGTGTGTGTTGGGGATTTGTGTGTGTGTTGGGGAT
TCTGTGCATGTTGGGAGTTGTGTGTGAGTTGGGGACAATGTGTACAGAGG
ATTGTGTGTTGGAAATTTTGTGTGTGCGTTGGGAATTTTGTGTATGTGTT
GTGGATTGCGTGTACGTTGGGGATTGTGCATGTTGGGAATTTTGTGTGTG
TGTTGAGAATTGTGTGTGAGGGAATTGTGTGTGTTTGAGATTGTGTGTGT
ATTGGGAATTGTGTGTGTGTTGAGGATTGTGTGTGTTCTGAGGATTGTAT
GTGTTGGGAATTTTGTGTGTGTGTTGAGGATTGTGTGTGTTGGGGATTCT
ACGTATGTTGAAAGTTGTGTGTGTGTTGGGATTGTGTGTGTGTTGTGGAT
TGTGTGTGTTGGGAATTGTGTGTGTGTGTTGAGGATTGTGTGCAGGGGGA
TTGTGTGTGTTGGAGATTGTATGTGTTGGGAATTTTGTGTGTGTGTTGGG
GACTGTGTATGTTTTGGGGATTGTGTGTGTTGGGAATTTTGTGTGTGTGT
TGAGGATTGTGTGTGGGGGGATTGTGTGTGTTGGAGATTGTGTGTGTGTT
GGGGACTGTGTGTGTGTTGGGGACTGTGTGTGTTGGGGTGTGGTGTGTTG
GAAATCGTGTGTTGGGGACACCGTATGTGTTTGGGGGAGGGTGTCAATAA
GTGGTCTGGAGTGTGATATTGGGGTGCAGGCTCCATGAGTCCCCACCCCA
CACCTGAGCCCTGGGACCGCCTATCTGCTTCGGGGTGGGGTCCCAGGACC
CTGTAGGTTCAGCCTACTAGTCCAGGCCCAATGCCCAATGCCTGCATCCC
TGCAGGCCCTGTGCTCTCCAGGCTCAGACCCCTCGCAGCCCTGCAGACCC
TCCCTGGGTCCATGTGTCTCTTTGCAGGTGCTCCAGCGAGTAGCAATGTG
GAGAGACCATCAGGCAGCCCTGGCCTCAGTGGCCGCAGTCCCCTGGCTCC
ACGCTGGGCCCACCCCACCAGGTCTCCTCTCCCATGGCCCAGGGGCCTTC
AGTGGGACTGAGAGGAGGAGGGAAGGAGAGTGGGTGACAGGGAAGAACTG
CAGGGAGAGAGGAGAGGGGTGGGAGAAGGAGAAGGAAGGAAGGGGTAGGA
TGGAAGCTGGGTTTCTCCCTGTGCCCGCCCCCTACTCCAGGACATGTGTC
CAAGCCCTGGCAGGTGGAATTTTGGGGGCAGGGCCTTGGTGGTGAGGAGA
CCTTCCAGGGGTCTGATAGCATCTCCCATCTCAGAGCCCACCTCCTGGGC
CCAGCCTCCCCTCCAGCCCACACAGTGGCATTCCCAGTCCTCAGAGGACA
GCTTCGTCCCACAAAGCTCAGAGCCTTGAGGAAGGCCCACTGCTGCCCTG
GAACAGAGACAGCATTCAACAGAGGTTGGAACAAGGCTCTACAGGGCTGG
GGGCAGAGGGAGGTTCTGTCCAGAATCTGCCTTCAGGACAAGTACAGCCA
GCAGGGGCAGCTTAGCCACTTATCCACTGCCTGGGCGAGGCACAGGGCTA
TGGAGGCACCTACCAACCAACAGTTCTCCAGCCCCAGAGCCCCAGCCCCT
GAGGCACAAGGGTGGGTGTGCCAGGAGACAGTTGCTGCGGGCCACCTTAG
CTGTCTGGCAGCACAGTGGGTGCTGCCAGGCTCCCTGGGGGCCCCCCGCC
AAGCCCACCTGGCCAGCTGGGCCCCCCCCACCTCCCCACCAAGCCACCCA
CACAGCCTCACATCTCTGAGACCCGGGAGTGGCCCTTTGTTCATAAACGA
GAGCTTCCTCGCCGTGGCCGCGCCTCGCAGACATCATCTTTGATGCTCTT
TTTCCACTGTTTCGGTGCTTTAATGTTTTCCCTTCAGAGCCGGGCCGAGT
GTCTCTCGGAGCCAGGCAGCCGCGCCAGCTGTCAGGCGGTTTCTAGCCTC
GCTTCGGTTATTTTAAGCTGATGAGCCTGACGCATCTCATCACTAATATC
AGCAGTTTCATTTCTCCTGTTTTCCATTCGCTGTAATAAAATGCTCAGCA
CAGAATACAAGGAGATAAGCAAGCCATTTCACAAACGCCGGGCCGCCAGC
CAGGCCCAGGCACTGGACCCCCTGAACCACCCCACCCTGGCACGAGTGGG
CTGGAGGGCAGGGCCCCGGGGAAGAAGGTCAAGGCTGGAAGGGGAGGTCA
GCCTCACAGCCAGCCCCTGCCACCGCCCCAGCCCCCCCGTCAGGCTGTTG
CAGGCATCACACGGTGGAAAGATCTGGAACTGTGGCCATGGTGTGAGGCC
ATCCACAAGGTGGAAGCTTTGAGGGGGAGCCGATTAGCCATGGACAGTTG
TCATTCAGTAGGGTCACCTGTGCCCCAGCGAAGGGGGATGGGCCGGGAAG
GCAGAGGCCAGGCACCTGCCCCCAGCAGGGGCAGAGGCTGTGGGCAGCCG
GGAGGCTCCCAGAGGCTCCGACAGAATGGGAGTGGGGTTGAGCCCACCCC
TCACTGCAGCCCAGGAACCTGAGCCCAGAGGGGGCCACCCACCTTCCCCA
GGCAGGGAGGCCCGGCCCCCAGGGAGATGGGGGGGATGGGGGAGGAGAAG
GGCCTGCCCCCACCCGGCAGCCTCAGGAGGGGCAGCTCGGGCGGGATATG
GAAAGAGGCCACAGCAGTGAGCAGAGACACAGAGGAGGAAGGGGCCCTGA
GCTGGGGAGACCCCCACGGGGTAGGGCGTGGGGGCCACGGGCCCACCTCC
TCCCCATCTCCTCTGTCTCCCTGTCTCTGTCTCTCTCTCCCTCCCCCACC
CTCTCCCCAGTCCTACCCCCTCCTCACCCCTCCTCCCCCAGCACTGCCTC
TGTCACTCTCGCCCACGTGGATGTGGAGGAAGAGGGGGCGGGAGCAAGGG
GCGGGCACCCTCCCTTCAACCTGACCTGGGACAGTTTCCCTTCCGCTCAC
CTCCGCCTGAGCAGTGGAGAAGGCGGCACTCTGGTGGGGCTGCTCCAGGC
ATG

[0415] 29. BCL2. Bcl-2 (B-cell lymphoma 2) is the founding member of the Bcl-2 family of apoptosis regulator proteins encoded by the BCL2 gene that was first described in chromosomal translocations involving chromosomes 14 and 18 in follicular lymphomas (Tsujimoto et al. Science 226 (4678): 1097-99). The dysregulation of cell death is a defining characteristic of malignant cells and BCL-2 protein plays a key and central role. BCL-2 confers an anti-apoptotic phenotype that contributes to the genesis of hematopoietic and lymphatic cancers. In many cases of diffuse large B-cell (DLBCL) and follicular lymphomas (FL), BCL2 overexpression is driven by the t(14,18) chromosomal rearrangement of the BCL2 oncogene. In chronic lymphocytic leukemia, impaired degradation of BCL2 mRNA causes continuous production of BCL2. The Bcl-2 gene has been implicated in a number of cancers, including melanoma, breast, prostate, chronic lymphocytic leukemia, skin, sarcoma, and lung carcinomas, as well as schizophrenia and autoimmunity. It is also thought to be involved in resistance to conventional cancer treatment and evidence also suggests that decreased apoptosis may play a role in the development of cancer.

[0416] Protein: BCL2 Gene: BCL2 (Homo sapiens, chromosome 18, 63123346-63319778 [NCBI Reference Sequence: NC_{—}000018.10]; start site location: 63318666; strand: negative)

Gene Identification

| | |
|---|---|
| GeneID | 596 |
| HGNC | 990 |
| MIM | 151430 |

Targeted Sequences

| | | | Relative |
|---|---|---|---|
| | | | upstream |
| | | | location to |
| Sequence | Design | | gene start |
| ID | ID | Sequence (5′-3′) | site |
| 13682 | | TGTCCACCTGAACACCTAGTCC | 2388 |

[0417] In FIG. 50, In MDA-MB-231 (human breast cell line), BL2 at 10 μM showed increased inhibition compared to BL3 and BL4 (10 μM). The BL2 (structure shown below) fits the independent and dependent DNAi motif claims. Both BL3 and BL4 contained a single mismatched base meaning neither sequence had 100% homology to its complementary strand. This demonstrates that many times even a single mismatch to the complementary strand decreases the inhibitory effects of a DNAi oligonucleotide. The mismatches for BL3 and BL4 are noted below with the mismatched letter highlighted and bolded. It should also be noted that a 20-mer version of BL2 demonstrated similar significant inhibition (data not shown) as the 24-mer version of BL2 shown in FIGS. 50, 51, and 52.

[0418] In FIG. 51, M14 (human melanoma cell line), BL2 at 10 μM showed increased inhibition compared to BL3 and BL4 (10 μM). The BL2 (structure shown below) fits the independent and dependent DNAi motif claims. Both BL3 and BL4 contained a single mismatched base meaning neither sequence had 100% homology to its complementary strand. This demonstrates that many times even a single mismatch to the complementary strand decreases the inhibitory effects of a DNAi oligonucleotide. The mismatches for BL3 and BL4 are noted below with the mismatched letter highlighted and bolded. It should also be noted that a 20-mer version of BL2 demonstrated similar significant inhibition (data not shown) as the 24-mer version of BL2 shown in FIGS. 50, 51, and 52.

[0419] BL3: ACCGGCGCTCGGCGCGCGGA (SEQ ID NO: 13825)(needed to have a G in place of the C for 100% homology)

[0420] BL4: GACGCGCCGGGCCGGGCGGA (SEQ ID NO: 13826) (needed to have an A in place of the C for 100% homology)

[0421] In FIG. 52, as a counter screen to test for nonspecific toxicity, BL2 and BL7 were tested at 10 μM in NMuMG (a normal murine mouse mammary gland cell line) and measured at 24 and 96 hours post exposure. As would be expected, BL2 has no cytotoxicity against a normal, nontumorigenic mouse cell line because it was designed for homology with the human genome and only has a maximum of 67% homology across the entire mouse genome. BL7, however, has approximately 90% homology across the entire mouse genome. This demonstrates that duplication and high overlap with non-targeted regions of the genome leads to non-specific cytotoxicity.

[0422] The secondary structure for BL2 are shown in FIG. 53. Sequence 302 (BL2) is shown in FIG. 53.

[0423] In FIG. 54, In HCT-116 (human colorectal carcinoma), BL9 produced statistically significant (P<0.05) inhibition at 10 μM compared to the untreated and negative control values. The BCL2 sequence BL9 will not form a secondary structure under physiological conditions.

Genetic Code (5′ Upstream Region)

(SEQ ID NO: 13683)

CCTCCCAAAGTGCTGAGATTACAGGCATGAGCAACCACACCTGGCCGATA
CATACCTATATTAAACATTAGTATGTTCATGTTAGAATAATGTACCTTTT
GAATTTCATAAACTTGGAGAATATTTATATTGATGATGGATGAAAGAACT
TTCTTGGATGGATGAAGAGAGTAACGCTGTGAAACAACCAGCAGGTGGCG
AAAACTGGCAATCAAAAGCTTTTTGTTTGGTGGCCTGGGGAATGAAGACG
GAAAGAAAACACAGGCCATTCAGACTCTTGATACAATCTCCATTCCCTGC
ATCTTGTTTTTTTTCTCTTCCTGGTGCCACGCTACTTGTAGAATCCAACC
AGGTAAAGCTGCCAAAAGGGTCATCCATTGGCTCTTACAAGTAGAAAACA
TCTTGGAAAGTGAAAAGTCCACTGTGCATATGTTTGTAAGGTTGTTGGAA
GGTCTCAGGCATAGATCTAGGATTCAAATCCAGTTACTCCTGCCTCAGGC
TGGTGTTCCCTCCCCCACCTCAGCATTGCCCAAAGACGAGTAGTCAATGT
CACATACTTCCTGGGAATACTTGCCCTTATGCTTTAAAATGGAATCTAAT
AAACATGGAATCTGAACGCAGGAATGGTTTCACTCTTTCATTTGAAAGAG
TATCTAGAACATTCCCAGGGAAAATATAACCCCTAGCCAAAGACTGCAAT
ACAGACCTGTCTCAAGACTGATTATAGCCAAGATGCCACATAAGGAATCA
GTCTGGGAAAATCCATAGAGTGAGGCTCTGTGGGAGCAAAGGAAGACGAA
AATCAGTCAGCTTTTCTTTCTCTGGAAGTAGGGGATCCGTTTCCTTCTGG
CTGCCCCCTTTGCAGAAGTACAGTTTCTTTTGCAGGTTTGTCCTATCATT
TCCTCACTCATATGCTGAGTATTAGGAGCTTGAAGCCTTTCAATTCCTCT
TAGGTAATTTTGGGGCTTTAAAATACGCTTTCAAGATTTCTAAACCATAC
TGTTGTGCAATTGGTATGAATTTATGTGAGAACATTTATTCTAGGTCAAT
CTATACCCAGTGTCTATCCAGACCAAAACACCTCCCACGCGCATAAAAGG
GACTCTGTCCCAACCATCAGAAGGGCAAGAAGGAGGATCTCCTTTCATCC
CCTCTTGCCTGGATAAGAAATTTGTACCCAGGCCCCCATTCCTATGTGAG
AGAAGTTGGCTTGTTGGGCTGATGGGATACAATAAATGAAGAAATAAAAT
AAAAACACCCAAGAGAGATGGCAGTGCGTATAGTCCCAGCTATTCATGAG
GCTGAGGTGGGAGAATCCTTCGAGCCCAGAAGTTCGAGTCCAGCCTGGGC
AACATAGCAAAAGCCATCTCTTAAAAAAAAAAAAAAAAGGCCAACTAAGT
AAAAATTAAAAAAATCATAATTTGGTGTGCTTTTCTGGCTTTTTAAAGAA
TGTTTTGATTTTAGAGTAGGAATGAGACAAAATAAAGATGTCAGGCAGGG
CACAGTGGCTCATGTCTGTAATCCCAGCACTTTGGGAGGCTGAGGCAGGC
GGATAACGAGGTCAGGAGTTCGAGACCAGCCTGGCCAGTATGGCGAAACC
CCGTCTCTACTAAAAATACAAAAATTAGCAGAGCGTAGTGGCGTGCACGT
GTAATCCCAGCTACTCAGGAGGCTGAGGCAGAATTGCTTGAGCCTGGGAG
GCAGAGGTTGCAGTGAGCTGAGATCGCACCACTGCACACCAGCCTCCAAG
ATACAACAGAGCAAGACTCTGTCTCAAAAAAAAAAAAAAAGTCATAGCAT
ATTTGTACACATTGTAGTACTCATTTGTCATCTTTCTTGACCCCAATAAT
CCAGTGTCCCTATATATTTGCACTCGAGCCCTATTAAGTAAGCCGCTGTG
CTTCTAGAAGACCTTTTTCTTTTCTTGGTGCTTTGTCAAAGACTCTTGGA
GATAAAAATACACACGTGCAACTTGTTTGTCCTCTTGTCCTTTTTTGCTA
GGGGCTATTCATGCTGATTAATTTAAAACTGTCTGCTTGCGCGTACACAC
GTCTGCGAGTGTGAATGTGTATGTGTGTATCTATGTACCTCATTTGAGAA
AGTGCGGCCAACTAGGATTGGCTACGAGGCAAAGGTGGAGACCTTTAGGA
GCCCACCCACCCCAGCGTTAGGACGGTGGGCCTGAAAGTTACTATATGGA
AGTCCTCATCGTGTAGCACTAAACCAGTGTAAAAGGTGTTAGGGACAGAG
GGAAAACATTGACTTAAACTGTCGTAAAGCCCTTGATAAACCCCTTCCCT
GGAGCGCTGAGTTCTGCATGGCCTGGGCCACGGACTAGGTGTTCAGGTGG
ACACGGGCGGGGATGCGCGTGCGTGTGTAGTGCGCGGACACCTAGGAAGC
TACTTGAAAGTAAACACCACGCTCGGGGCGTCCCTAGACATTGCTTAAAA
CGTGCAGAGTCACCTGTCTTCACAGCAGGGCAGCGCTGAGGTCCCACTGC
TGGGGGCGGTGGGGGGCGGCATTGGCCTGGGTCTTCCCCCGGCGGCCGAG
CGCCGGTAACACAACGTGTGTGTGTGTAGGCGCGTGTACACACTCTCATA
CACGGCTAGAAAGGGTCCAGGCGACACACACACTCCCACATACACGGCTA
GAAAAGGTCCAGGCGAGACACACACACACACACACACACACACACACACT
CCACACACACTCACACGGCCAGAAAGGGTCCAGGCGGTTCCCGGCGCTTT
TCCAGCCCTTGTTTTCATGGCGCACCCTCCCGCCAGCCGCCCCCCTCCGC
ACTCCGTCGTCCGCCCGGCCCGGCCGCGTGCGGTTCCCCGGGAGCCCCCA
CCCCGTCGCGGACCCCAGCGACCACCAAGTCCGCACGCGGCCTGCCGCAG
GCCTGAGCAGAAGGCCCCGCGCACACCCACCGCGCCGCGGCCGCGCGGGA
GGCCTGTGCCGCCCGCGCCACCCACTGGCCGGGCCCCGCGGGCGCAGCGG
AGCGGGCGGGTGGCCGGCCCGGACGCGCCCTCCCCGGCCGCGGCCCCGCG
CGCCATGTGCCCCCGGCGGGACGCGCCACTCCCGGGCCTGCCGCGGCGCC
TTTAACCCGGGCCAGGGAGCGGGGCGGAGGGGGCGGTCGGGTGGCTCAGA
GGAGGGCTCTTTCTTTCTTCTTTTTTTGAATGAACCGTGTGACGTTACGC
ACAGGAAACCGGTCGGGCTGTGCAGAGAATGAAGTAAGAGGACAGGCACC
ACAGCCCCGCTCCCGCCCCCTTCCTCCCGCGCCCGCCCCTCCGCGCCGCC
TGCCCGCCCGCCCGCCGCGCTCCCGCCCGCCGCTCTCCGTGGCCCCGCCG
CGCTGCCGCCGCCGCCGCTGCCAGCGAAGGTGCCGGGGCTCCGGGCCCTC
CCTGCCGGCGGCCGTCAGCGCTCGGAGCGGGCTGCGCGGCGGGAGCTCCG
GGAGGCGGCCGTAGCCAGCGCCGCCGCGCAGGACCAGGAGGAGGAGAAAG
GGTGCGCAGCCCGGAGGCGGGGTGCGCCGGTGGGGTGCAGCGGAAGAGGG
GGTCCAGGGGGGAGAACTTCGTAGCAGTCATCCTTTTTAGGAAAAGAGGG
AAAAAATAAAACCCTCCCCCACCACCTCCTTCTCCCCACCCCTCGCCGCA
CCACACACAGCGCGGGCTTCTAGCGCTCGGCACCGGCGGGCCAGGCGCGT
CCTGCCTTCATTTATCCAGCAGCTTTTCGGAAAATGCATTTGCTGTTCGG
AGTTTAATCAGAAGAGGATTCCTGCCTCCGTCCCCGGCTCCTTCATCGTC
CCCTCTCCCCTGTCTCTCTCCTGGGGAGGCGTGAAGCGGTCCCGTGGATA
GAGATTCATGCCTGTGCCCGCGCGTGTGTGCGCGCGTGTAAATTGCCGAG
AAGGGGAAAACATCACAGGACTTCTGCGAATACCGGACTGAAAATTGTAA
TTCATCTGCCGCCGCCGCTGCCTTTTTTTTTTCTCGAGCTCTTGAGATCT
CCGGTTGGGATTCCTGCGGATTGACATTTCTGTGAAGCAGAAGTCTGGGA
ATCGATCTGGAAATCCTCCTAATTTTTACTCCCTCTCCCCGCGACTCCTG
ATTCATTGGGAAGTTTCAAATCAGCTATAACTGGAGAGTGCTGAAGATTG
ATGGGATCGTTGCCTTATGCATTTGTTTTGGTTTTACAAAAAGGAAACTT
GACAGAGGATCATGCTGTACTTAAAAAATACAAGTAAGTTCTCTGCACAG
GAAATTGGTTTAATGTAACTTTCAATGGAAACCTTTGAGATTTTTTACTT
AAAGTGCATTCGAGTAAATTTAATTTCCAGGCAGCTTAATACATTCTTTT
TAGCCGTGTTACTTGTAGTGTGTATGCCCTGCTTTCACTCAGTGTGTACA
GGGAAACGCACCTGATTTTTTACTTATTAGTTTGTTTTTTCTTTAACCTT
TCAGCATCACAGAGGAAGTAGACTGATATTAACAATACTTACTAATAATA
ACGTGCCTCATGAAATAAAGATCCGAAAGGAATTGGAATAAAAATTTCCT
GCATCTCATGCCAAGGGGGAAACACCAGAATCAAGTGTTCCGCGTGATTG
AAGACACCCCCTCGTCCAAGAATGCAAAGCACATCCAATAAAATAGCTGG
ATTATAACTCCTCTTCTTTCTCTGGGGGCCGTGGGGTGGGAGCTGGGGCG
AGAGGTGCCGTTGGCCCCCGTTGCTTTTCCTCTGGGAAGGATG

[0424] BCL2

[0425] Apoptosis also plays a very active role in regulating the immune system. When functional, apoptosis causes immune unresponsiveness to self-antigens via both central and peripheral tolerance. When defective, it may contribute to autoimmune diseases (Li et al., Clin. Dev. Immunol. 13 (2-4): 273-82 and reviewed by Tischner et al., Cell Death and Disease (2010) 1, e48), such as type 1 diabetes, manifested as aberrant T cell AICD and defective peripheral tolerance. Dendritic cells are the most important antigen presenting cells of the immune system such that their activity must be tightly regulated by such mechanisms as apoptosis and their lifespan may be controlled in part by BCL-2. Other inflammatory diseases include inflammatory bowel disease, psoriatic arthritis, lupus, heart disease, and Alzheimer's and schizophrenia.

[0426] Given its biological importance, BCL2 is a prime candidate for targeted therapies. Numerous approaches that block or modulate production of BCL2 at the DNA level (e.g., retinoids and histone deacetylase inhibitors), RNA level (targeted antisense oligonucleotides such oblimersen and SPC2996 or siRNA approaches), or the protein level (gossypol, obatoclax, ABT-737, ABT-263, ABT-199) have been reported and a few have entered clinical development.

[0427] 30. CMYC. Myc (c-Myc) is a regulator gene that codes for protein that is a transcription factor. In the human genome, Myc is located on chromosome 8 and is believed to regulate expression of 15% of all genes (Gearhart et al., N Engl J Med 2007; 357:1469-1472). CMYC activates expression of many genes through binding on consensus sequences (Enhancer Box sequences (E-boxes)) and recruiting histone acetyltransferases (HATs). This means that CMYC is activated upon various mitogenic signals such as Wnt, Shh and EGF (via the MAPK/ERK pathway). By modifying the expression of its target genes, Myc activation results in numerous biological effects. CMYC has the capability to drive cell proliferation (upregulates cyclins, downregulates p21), but it also plays a very important role in regulating cell growth (upregulates ribosomal RNA and proteins), apoptosis (downregulates Bcl-2), differentiation and stem cell self-renewal. CMYC is a very strong proto-oncogene and it is very often found to be upregulated in many types of cancers. Myc overexpression stimulates gene amplification (Denis et al., Oncogene 6 (8): 1453-7), presumably through DNA over-replication.

[0428] It can also act as a transcriptional repressor. By binding Miz-1 transcription factor and displacing the p300 co-activator, it inhibits expression of Miz-1 target genes. In addition, myc has a direct role in the control of DNA replication (Dominguez-Sola et al., Nature 448 (7152): 445-51).

[0429] Mutated CMYC is found in many cancers, causing it to be constitutively expressed thereby driving the unregulated expression of many genes involved in cell proliferation. A common human translocation involving CMYC is t(8; 14) which is critical to the development of most cases of Burkitt's Lymphoma. Malfunctions in Myc have also been found in carcinoma of the cervix, colon, breast, lung and stomach (Prochownik, 2004; Expert Rev Anticancer Ther.; 4(2):289-302).

[0430] Because CMYC is part of a dynamic network whose members interact selectively with one another and with various transcriptional coregulators and histone-modifying enzymes, it is an attractive therapeutic target. Several approaches including small molecules, peptides, and oligonucleotide therapeutics have been pursued. However, knowledge of which pathway should be attacked (c-Myc transcription, translation, interaction with other myc network members, DNA binding and transcriptional activation) is crucial. Clinical efficacy will likely require intervention at several levels, perhaps in combination with traditional chemotherapeutic drugs or agents that target other oncoproteins (reviewed by Levens, 2010; Genes and Cancer 1: 547).

[0431] CMYC

[0432] Protein: CMYC Gene: CMYC (Homo sapiens, chromosome 8, 128748315-128753680 [NCBI Reference Sequence: NC_{—}000008.10]; start site location: 128748840; strand: positive)

Gene Identification

| | |
|---|---|
| GeneID | 4609 |
| HGNC | 7553 |
| MIM | 190080 |

Targeted Sequences

| | | | Relative |
|---|---|---|---|
| | | | upstream |
| | | | location |
| | | | to gene |
| Sequence | Design | | start |
| ID No: | ID | Sequence (5′-3′) | site |
| 7551 | | CGATGAGGGTATTAACTCTGGC | 335580 |
| 7552 | | CGGGGGTCCTCAGCCGTCCAGACC | 518 |
| 7602 | | CGCTTATGGGGAGGGTGGGGAGGG | 634 |
| 7603 | | CGGTGGGCGGAGATTAGCGAGAGA | 559 |
| 7606 | | GGCGCTTATGGGGAGGGTGGGGAGGG | 632 |
| 506 | | CCTGGCACGTGTCCCTGGTCAAG | 3482 |
| 507 | | CACGTGCGGCCTGTCAAGAGATGA | 5926 |

Target Shift Sequences

| | | Relative |
|---|---|---|
| | | upstream |
| Sequence | | location to gene |
| ID No: | Sequence (5′-3′) | start site |
| 7551 | CGATGAGGGTATTAACTCTGGC | 335580 |
| 7552 | CGGGGGTCCTCAGCCGTCCAGACC | 518 |
| 7553 | GGGGGTCCTCAGCCGTCCAG | 519 |
| 7554 | GGGGTCCTCAGCCGTCCAGA | 520 |
| 7555 | GGGTCCTCAGCCGTCCAGAC | 521 |
| 7556 | GGTCCTCAGCCGTCCAGACC | 522 |
| 7557 | GTCCTCAGCCGTCCAGACCC | 523 |
| 7558 | TCCTCAGCCGTCCAGACCCT | 524 |
| 7559 | CCTCAGCCGTCCAGACCCTC | 525 |
| 7560 | CTCAGCCGTCCAGACCCTCG | 526 |
| 7561 | TCAGCCGTCCAGACCCTCGC | 527 |
| 7562 | CAGCCGTCCAGACCCTCGCA | 528 |
| 7563 | AGCCGTCCAGACCCTCGCAT | 529 |
| 7564 | GCCGTCCAGACCCTCGCATT | 530 |
| 7565 | CCGTCCAGACCCTCGCATTA | 531 |
| 7566 | CGTCCAGACCCTCGCATTAT | 532 |
| 7567 | GTCCAGACCCTCGCATTATA | 533 |
| 7568 | TCCAGACCCTCGCATTATAA | 534 |
| 7569 | CCAGACCCTCGCATTATAAA | 535 |
| 7570 | CAGACCCTCGCATTATAAAG | 536 |
| 7571 | AGACCCTCGCATTATAAAGG | 537 |
| 7572 | GACCCTCGCATTATAAAGGG | 538 |
| 7573 | ACCCTCGCATTATAAAGGGC | 539 |
| 7574 | CCCTCGCATTATAAAGGGCC | 540 |
| 7575 | CCTCGCATTATAAAGGGCCG | 541 |
| 7576 | CTCGCATTATAAAGGGCCGG | 542 |
| 7577 | TCGCATTATAAAGGGCCGGT | 543 |
| 7578 | CGCATTATAAAGGGCCGGTG | 544 |
| 7579 | GCATTATAAAGGGCCGGTGG | 545 |
| 7580 | CATTATAAAGGGCCGGTGGG | 546 |
| 7581 | ATTATAAAGGGCCGGTGGGC | 547 |
| 7582 | TTATAAAGGGCCGGTGGGCG | 548 |
| 7583 | TCGGGGGTCCTCAGCCGTCC | 517 |
| 7584 | CTCGGGGGTCCTCAGCCGTC | 516 |
| 7585 | GCTCGGGGGTCCTCAGCCGT | 515 |
| 7586 | AGCTCGGGGGTCCTCAGCCG | 514 |
| 7587 | CAGCTCGGGGGTCCTCAGCC | 513 |
| 7588 | ACAGCTCGGGGGTCCTCAGC | 512 |
| 7589 | CACAGCTCGGGGGTCCTCAG | 511 |
| 7590 | GCACAGCTCGGGGGTCCTCA | 510 |
| 7591 | AGCACAGCTCGGGGGTCCTC | 509 |
| 7592 | CAGCACAGCTCGGGGGTCCT | 508 |
| 7593 | GCAGCACAGCTCGGGGGTCC | 507 |
| 7594 | AGCAGCACAGCTCGGGGGTC | 506 |
| 7595 | GAGCAGCACAGCTCGGGGGT | 505 |
| 7596 | CGAGCAGCACAGCTCGGGGG | 504 |
| 7597 | GCGAGCAGCACAGCTCGGGG | 503 |
| 7598 | CGCGAGCAGCACAGCTCGGG | 502 |
| 7599 | CCGCGAGCAGCACAGCTCGG | 501 |
| 7600 | GCCGCGAGCAGCACAGCTCG | 500 |
| 7601 | GGCCGCGAGCAGCACAGCTC | 499 |
| 7602 | CGCTTATGGGGAGGGTGGGGAGGG | 634 |
| 7603 | CGGTGGGCGGAGATTAGCGAGAGA | 559 |
| 7604 | CCGGTGGGCGGAGATTAGCG | 558 |
| 7605 | GCCGGTGGGCGGAGATTAGC | 557 |
| 7606 | GGCGCTTATGGGGAGGGTGGGGAGGG | 632 |
| 13684 | CCTGGCACGTGTCCCTGGTCAAG | 3479 |
| 13685 | CTGGCACGTGTCCCTGGTCA | 3480 |
| 13686 | TGGCACGTGTCCCTGGTCAA | 3481 |
| 13687 | GGCACGTGTCCCTGGTCAAG | 3482 |
| 13688 | GCACGTGTCCCTGGTCAAGT | 3483 |
| 13689 | CACGTGTCCCTGGTCAAGTA | 3484 |
| 13690 | ACGTGTCCCTGGTCAAGTAG | 3485 |
| 13691 | CGTGTCCCTGGTCAAGTAGG | 3486 |
| 13692 | ACCTGGCACGTGTCCCTGGT | 3478 |
| 13693 | TACCTGGCACGTGTCCCTGG | 3477 |
| 13694 | TTACCTGGCACGTGTCCCTG | 3476 |
| 13695 | TTTACCTGGCACGTGTCCCT | 3475 |
| 13696 | ATTTACCTGGCACGTGTCCC | 3474 |
| 13697 | AATTTACCTGGCACGTGTCC | 3473 |
| 13698 | AAATTTACCTGGCACGTGTC | 3472 |
| 13699 | GAAATTTACCTGGCACGTGT | 3471 |
| 13700 | GGAAATTTACCTGGCACGTG | 3470 |
| 13701 | AGGAAATTTACCTGGCACGT | 3469 |
| 13702 | AAGGAAATTTACCTGGCACG | 3468 |
| 13703 | CACGTGCGGCCTGTCAAGAGATGA | 5928 |
| 13704 | ACGTGCGGCCTGTCAAGAGA | 5929 |
| 13705 | CGTGCGGCCTGTCAAGAGAT | 5930 |
| 13706 | GTGCGGCCTGTCAAGAGATG | 5931 |
| 13707 | TGCGGCCTGTCAAGAGATGA | 5932 |
| 13708 | GCGGCCTGTCAAGAGATGAG | 5933 |
| 13709 | CGGCCTGTCAAGAGATGAGG | 5934 |
| 13710 | TCACGTGCGGCCTGTCAAGA | 5927 |
| 13711 | GTCACGTGCGGCCTGTCAAG | 5926 |
| 13712 | AGTCACGTGCGGCCTGTCAA | 5925 |
| 13713 | AAGTCACGTGCGGCCTGTCA | 5924 |
| 13714 | CAAGTCACGTGCGGCCTGTC | 5923 |
| 13715 | TCAAGTCACGTGCGGCCTGT | 5922 |
| 13716 | TTCAAGTCACGTGCGGCCTG | 5921 |
| 13717 | CTTCAAGTCACGTGCGGCCT | 5920 |
| 13718 | CCTTCAAGTCACGTGCGGCC | 5919 |
| 13719 | TCCTTCAAGTCACGTGCGGC | 5918 |
| 13720 | TTCCTTCAAGTCACGTGCGG | 5917 |
| 13721 | ATTCCTTCAAGTCACGTGCG | 5916 |
| 13722 | AATTCCTTCAAGTCACGTGC | 5915 |

Hot Zones (Relative upstream location to gene start site)
1-1880
2150-2240
2420-3050
3230-4130
4310-4400
5900-6000
335000-336000

### Examples

[0433] In FIG. 55, CM7 at 10 μM showed statistically significant inhibition compared to control values in MCF-7 (human breast cancer cell line). CM7 (structure shown below) fits the independent and dependent DNAi motif claims

[0434] In FIG. 56, CM7 at 10 μM showed statistically significant inhibition compared to control values in MDA-MB-231 (human breast cancer cell line). CM7 (structure shown below) fits the independent and dependent DNAi motif claims.

[0435] In FIG. 57, In MCF7 (human mammary breast cell line), CM7, CM12, CM13, and CM14 produced statistically significant (P<0.05) inhibition at 10 μM compared to the untreated control values. The CMYC sequences CM7, CM12, CM13, and CM14 fit the independent and dependent DNAi motif claims.

[0436] The secondary structure for CM7 is shown in FIG. 58. Sequence 317 (CM7) is shown in FIG. 58. The secondary structures for CM12, CM13, and CM14 are shown in FIG. 59, FIG. 60, FIG. 61.

Genetic Code (5′ Upstream Region)

(SEQ ID NO: 13723)

TGATTGTGGCCAGGCACTACAGCTCACACCTACAATCCCAGCTACTCTGG
AGGCTGAGGTGCGAGGATGGCTTGAGCCCAGGAGTTCAAGACCAGCCTAG
GCAACATAGTGAGACCCTGTCTCTAAAAGGTTTTCTAAAATTAGCCAGGT
GCATATGCCTGCAGTTCCAGATTCTCAGAAGCCAGAAGTGGGGAGGATCT
CTGGAGTTCAGGAGTTTGGGACCACGGTAAGCTATGATTGTGTTACTGCA
CACCAGTTTGGGTGACAGAGCGAGACCCCTTCTCTCAAAACAAATAAATA
AGATTGTGGTGATAGCTATACAACCCTGTGAATAACTAAAAATTGTTGAA
CCATGCACTTTAAGTGCATGAATTTTATGGCATGTGAACTTTATCTCAAT
AAGGCTGCCATTACAAAGCTAAAAAGGGAGGCAGGTGCATGAGCACATAT
ATGTCTAATATTAGCTAAAATAGTATCACCATTATTAAATAAACTTTTAA
AAAATACCTTCTTTCTGAGAATGCAATTCTTCCTTATAATCAGAACCATG
AATATACCAGGAAACTTTTTAAATCAGGGAACAAATGCCTACGAAGGACA
GGCACAAGCCAGAAAGGGACTATGGATGAATTAAGTGGGCTGAGCATATG
GGAGCGGTGGAGACTGGGGCAAACTGAACAGCTCCTGGCCCTTTTAAAAG
AAATCGGCTGCTCCTCAACTTCCATCCACTTCTGAATGCAGTTCCAGAAT
TACCAAATCTGCCTGTTTAAGGAAAGGCACAAATTCAGATTGTTAATGTG
AAATCTATTGACTTGTAAGTGTTGGCACCTATTTTTAAATGTTATAAATG
CTGAGAGGGTCAAAACCTGTCATCCAAGCCAACCTACCAGTAAGCAAGAC
TTGGTCCTCAAGCAAGTTTGCTGCCTCTGCTTTGAGTACTTTAGCATGAC
TTTCAAAACCTCCCACCTCCCCCTCGCCCTGCCTAAACCCACTTTACCCC
TCACCACCACTGCAAGAAGTTATCCAAGCTATGAAGAGAGACAGAAGAAT
TCATACATAAATAAAGAGTCCCAAAACATTCTCAAAGATGCCAAAGTCAG
GCTAGGGTGGCATGGAGAGGGAGTGGGGCATAAAGTTTTTGATTCCTAAT
CTAATTAGAGAGCCCTATAACAGATTCTTTGTTCAAAGACCAAATTTAAT
TTACAATTTTATATCTCCAGTGAAGTCAGCTTTTATTAATTTCCAGCACA
ATATTTGGATATACTGGCCAGAACTTCAATGAGTTCCTATTTAGTGTTTA
ATCTTCTAATGCATTCCAATTAATTATTTCAGTTTTATGGCAAACTGTCT
TCAGCCAACATCCAAGCTGGACACCCCATGCCTCTCCACTCACCCAAAAA
ACCAGCTCGGGAGGTGTCAATATAATGACTTAAGATGCTGAATGGTAAAG
GACAGGATTGGAAGGAAATTGCGCCTGCAATTATGCACTAATGCTTCACC
AGAGAAGCAGATGGCATTCCTTGCATAAATTATTATTTATCCTTGGAATT
CCCCTCTGCCTATTACCAAATCAACCCTTGAAAACAAGTCTTTGTTGGGT
CTGTGAAGTCCCCTGGCCAGTTTCCAATGTCTGCTCCCTCCCTCACATCC
CACCCTCCAGAGCTGCAGCGAGGGTAAGAACTCCAACATGGCCCACAGGC
AAGGGTTTCCGAAAGCATCGACGTTCTAAATACATTTGGACGGAGGTGCA
CAGAAAGGAGTCCGCTTTATTTTGCAGACTGGGAATCCAGATGCAATGAC
CACAGGCAGAAAGCATGGAGCAGAACCTCCCAGCCTCGGCTGTACCCCCA
GTGATAAGGCTTGCCACGTGTGGACGTCACCAGGTTGCCCACCACAGCAC
GGGGCTTAGGCTGTACTGTGCATTCTCTCATGGAATCCTTGAACAAGGAT
TGAGGTGGGCAATGATGTTCCACTTTGAGGAAATGAAATGAAGAAACCAG
AGACTCTGAGACAAAGAAAAGGGCTTTGGGTTTTTTTGTGTTTTTTGGCT
TTTTATTTATTTATTTATTTTGTACAGATGAGGTCTCACTTTGTTGCCCA
GATTGGTCTCAAAGAATGGTGCTTTGGATTAGATCTTATTGTGATGAAAA
ATAAAAAAAAATTAAAAATTTTTTAATTTAAAAAGAATACTGCTTTTTTT
TTTTTTTTTTAACAGGGTCTCTCTCTATAGCCCCTCTCTATAGAGTGTAC
AGTGGCACAATCTCAGCCCGCTGCAACCTCTGCCTCCCAGGTTCAAGCGA
TCTTCCCACCTCAGCCTCCTGAATAGTTAGGACTACAGGCATGTGCCACC
ACGCCTGGTTAATCTTTTGTAGAGATGGGGTTTCGCCATGTTGCCCAGGC
TGGTCTTGAACTCCTGAGCTCAAGCGATCTGGCCACCTCAGCCTCCCAGA
GTGCTGGGATTACAGGTGTGAACCACCATGCCCAGCCAGAACACTGTTAA
CCTTAACATCAACAGGCAGCTACCATTTTCGAGTGCCTGCAATGTCATTT
AACCTTTAGGAACAGCTCTGGGAGACAGCTATAGTTGTTGCCATTTTCTG
CAGATTGAGAAACTGAGGCTCAGTTAAGTGACGTAATTCTAAGGCACCAC
ACCCAGTCAAGCGCAGTGACAGAATTCGAACTCTGGCTTGTAGGGATTCA
CAGGACTGCCAAAGCTTACGCTAACCCATTTCTTCTCCTGTGCACCATCA
TTGCCTCATTCTCTGCCCTCATTTTCTTTATTTATTTTTATTTATTTATT
TTTCTTTTTTTGAGATGGAGCTTCACTCTTGTTGCCCAGGCTGGAGTGCA
ATGGCACGATCTCGGCTCACTGCAACCTCCACCTCCCGCGTTCAAGAGAT
TCTCCTGCCTCAGCCTCCTGAGTAGCTGGGATTACAGGCATGCACCACCA
CGCCCAGCTAATTTTGTATTTTTAGTAGAGACGGGGTTTCTCCATGTTGG
TCAGGCTGGTCTCGAATTCCCTACCTCAGGTGATCCACCCGCCTCGGCCT
CCCAAAGTGCTGTGATTGCAGGCGTGAGCCACCGTGCCCAGCCGCTCTGC
CCTCATTTTCTCCCCAAAACCAAAGTCTACTTTACAAGCACAGATATTAC
TAACTTGTCTTACGAAACTTTCCAGAAGAAAGAGAAAGAATATATGTTTT
ACCAAGCCCCTTGGAGGACAAGGATTTGTTTCTGTATCCACTGTCTCGAT
ACTCATGGTGCCTTTTACCCCTTGGCATTATGCCCCAGGAAAGTGGCAAA
AGTAAGAGGTAACCTCTCCTTCCTTCCTTATTTCCCTAAGGAAATTTGCT
CTGGTCACCAGCAGCAGAGAAATAGAAAGCGCCGGGCACCTGGCTCGACT
GGGGCAGTGACAGGGCAGAGGCGGCCCAGGTTATGGTATCAAAAGGTTTC
TGGTGCTGAATCTCATGACTACTATTCACCGTGTGAGTTTAAGCAAGTCC
CTGCAACACCTCAATTTTCCCCATCTGTTAAATGGAATTTTAACCTACAC
CTCCTAGGATTACTATGGAGATTTAAGGAGGCAATGCAGTGGGGCTTTCT
AACCTTTTTAACTCACTGAGATACATTTCCCGTATCGTCCAAGTGCAGAC
ACACACACACACACACACACAGAGAGAGAGAGAGAGAGAAAAGAATACTT
CATCTGCAACACACTTTGATATTTTCTGTGCCAGCCCATTTTGTGAAATT
GCTCATCATGATTCATTAAATTCATTTCTTATTTACTATTTTTAAATTTT
TATACATGCAGGGGGCTCAAGTGAGGATTTCTTTCATGTATACATTGCAT
AGTCGTCAAGTCTGGTCATTAAATGTATTCATTATCCAAATAGTGAACAT
TGTTAAATTGATTTCATGATCCACTAAGGGGTCATCATTTGCCATTTTAA
AACTCTGACAGTATGAGCTTCTCCCTAGCCCAGTTCCTGTTACCATCTTC
CCATTCTTCCCTTCCTTCTTCAATTCAGATAGGATTTTCCTCCAGAGGGA
TTATAAAGTTGCGAGGAAAGCGCCTGCAGGGGGTGCTGTTCCACACTGTT
GTTGAAGTGTGGTTTGGTTTTTATTTCGTTGCATTTGCTTTTCGGTCAAT
GAGGGCAATTCATCTGGAATGACCCCCATCCTCGTCACCCTTGCTCCAAC
GATGTTGGGGCCCAGCTCATCAACAAGGACACCTGAACAGAGCCCTACCC
ATTGATGGAACCGAAGCAAGGGCAAGGAAGAGTTCTCAACCCTTCTCTCT
ATATACGATTAAAACTGGGTTAGGCTAGGTGTGCCCTCAGCTCAGAAGCT
CTCTCTAATAGCATTCCTTCACTAAGCACTTACAGAGTGCCTACCACGTG
CCAGGCATTGTGCTGGGCTCTGGAGACCACCTACTCTGTGAATGGCACCT
TGAGGCTTGATGGGTGAGAACGCGAGTAAAACACAATCCATACTGACCCC
AGAAGCTTCTCCTCAAGGAATCAGACATTAAAAAGCACAAAAACTATAAA
GTTGATTTTTTTTTTTTTTTTTTTTTTGAGACAAGAGTCTTGCTCTGTCA
CCCAGGCTGGAGTGCTGTGGCACCATCTGGGCTCACGGCAACCTCCACCA
CCCAGGTTCAAGCAATTCTCCTGCCTCAGCCTCTCGAGTAGCTGGGATCA
CAGGCATGCGCCACCATGCCCCGCTAATTTTTGTCATTTTTAGTAGAGAC
AGGGTTTCACCATCTTGGCCAGACTGGTCTCGAAATTCTGACCTCGGGTG
ATCTGCTCACCTCAGCCTCCCAAAGTGATGGGATTACAGGCATGAGCCGC
TGCATCTCTGGCCAAAACTTGAATGTTTGTTTGTTTTGAGACAGGATCTC
ACTCTGTCATCCAGACTGGAGCACAGTGACACAATCTTGGCTCACTGCAG
CCTCAACAGCCACGGCTCAAGCAATCTTCCTCCTCCACCTCAGTTTTCCA
AGTAGATAGGATTACAGCCATGAGGCACTGCACCCAGCTAATTTTTTTTT
TTTAATTTTTTTGTAGAGACAGGGTCTTACTGTGTTGCTCAGGCTGGTCT
CAAACTCCTGGGCTCAAGTGATCTGCCGGCCTTGGCCTCCCGAAATGCTG
GGATTACAGGTACGAGCCACCACGCCTGGCCAAACTTGTATTTTCTAAGA
CAGAAGAATGAGGGGATGGTTTAAACTCTCAAGGGAAGGGGAAAGGATCA
TGAAAAGCTCCTACAGGAAGATGCTTGAGTTGGATTACTAAGACATATGA
GCAGAGATGGCAGGCTGGCAGCCTGAGGGCCACCTCTGCCCATAGACATG
CTTTGCTTCTCCATATCATTTTTTTTCCCAACACACTGCTGCTGGCTTGA
AATCTCCATATAATTCTTACAATAAGTTGTTAACATTTTAAAACCTGGAT
TTCCACCTTCCCTGAAAAACTGGAAGCATTTCCACCCATGGGCCCATATT
TCAGGGTAACCACCAGAGCAGGTGCCAAATGGGAGCCACCAGACCTACAC
AGGCAAATGCTCTCCAGTTTACCAGTCTCCACCACTCCCTATTGTATTCT
TCGTTTACATTTCCTGCCAAACCTCTGTAAGCATCTGAGTTGGCAACCCT
TGATGTGTTAGCGGAAAATGTGGATCAGAAGTTAGAAAGAGTTTCTAAAC
CTGGTTGTTGATTTACGCTTTATGCTTTGAAGGAAAACAGTTTTTCCAAT
GCCCAGATCCACTCACCAAGACAAAAAAAAAAGCAAGCTGTAGATTTCAG
TAGCAGCCTTGTCTAGCCAGCAATAAAGGTGCCCTGGGTTTCCAGGACCA
CACCCCAGGGATTAGCCCCGGGGCATCATATGAATTCAGTGAAAGGCGGG
AAATCCTAACATAAAGCGTTGATTCGTATTAAATAGGAACAATGCCTAAT
TCTGCCTTCCTGAACTTCCAGAATTTTGCTTTTTCTGAATAGAGTGATCT
GCAAAACAGCATACACTTGGAATAGTAAGTCGTGCAAGAGTTGGAGACAG
GAAGGGGGTGGGTTTGGAATTGTCTCCAAACATTAGATAATCTCTTTGTG
ATTCTAAACCTCAACTTGACAAGCTTGTATTAGTCCACAATTTTTCACAC
TTGATGAAGTGATAAAGGACATCAATTTCATGGAACTCACTATGAAACAC
CATGCAATATTGATACATTTAACTTAAAACAGCTCAATACATAACTTTCT
GCTAAATCTGGAACTCACATTAACAATTGCTAACATTTGCTGAGTGTGGG
CCAGACAGCAGGCTCTGTGCTGAATGCCTTATCTCACTTAATTCCTGTAA
CACCTTCAATAAGATAGGTGCTACAATTATAGTAATCCCATTTTACAGAT
GAGAAAAGTGAGATTCAGAGAGGTCATGTGACTTGACAGATTTATCAGGT
GATCATGACAGAGTAGTCCTCCAACCAAGCTGATTCAGCAACCCGTCCTT
ATATTCTAGATTCTTGTGTAGCCAAAAAGTTATTGAGAAAGTCTGCCCAT
TGACTTCATTCTCTTACCCAGTGTAGAGTCAGCATACATTCATTCACATT
AACTATGGGCCAGACTTGATTCCTGGCCTTGGGACTTTTTTTTTTTTTTG
GCAGGGGCTGATAACATTCTATTTTATTTATTTATTTATTTCTCTCTCTT
TTCTTTTAATTATACTTTAAGTTCTGGGATACATGTGCAGAACATGCAGG
TTTGTTACATAGGTATACACATGCCATGGTGGTTTGCTGCACCTACCAAC
CCATCATCTACATTAGATATCTCTTCTAATGCTACCCCTCCTCTAGACCC
CCGGGACATTTATAATCTCATGAAGAAGAGAAAAAGGAGGCCTTTCTCTG
ACAGCTAGAAAACCACAGTTAGTCTATTTTAGCCGGAGACCCTGGATTCT
ACCCTGAGAACAAAGGTTTATGTTTCAGCAGCTTAATTAGAGGTTTTCCA
GAACTTTTTCTGGCTCCATGCTTTTATGATTCTGTAAGATGATCATGGGA
AAAGGAAGAGTCCACAGAGAAAATGGGGCTTGAACTTGGGCTGGGAGGAA
AGGTGGTTCTTAGATAAATCAAGAAGAGAAGAGACAGTAAGTCTGGGGAA
CTGCCTGAACCAAAGTGCTGAGGTGGAAACTTGTGTGTCACTCAGAGTGG
CTGTAAATAGACCTGTTTCTCTGAAGTGCAGAGTTGGTAAGAAATAGGGT
AAGATAAGGAGGAGGCCAGATGCATGAGGGCTTGGAATTCCAAGCTCATA
ATGGAGAACCTCATTTTGGACCATGGGGGTCAACTGAAGAATTTTAAATG
AAGAGGAAAATTAATCAGTGTGCAAGGTTAAATGGAGTGGCAGAGACTAG
GAGCTATTAGGAATCTACTGCAAGATGATTCTAACAGCCATAGGTAGTGG
GTAAAAGAGGAAAGTGAGCCAATAAGGGAAACAGAAGAACAAGTTGAATA
TGTGGGAATATAATCAGGAGAATGTGGAGTGAACCCAGGGATTCTCAACC
TCAGCACTGGTGACATTTTGAGCCCCACTCTCTGTTGTGGGAGCCGTCCT
GTGCAATGTAGGACATTTAGCAGCATCGTTGGCCTCTACCCACTAAAAAC
GCCAAGTAGTAAGGCCCCATCCCTTAGTGACAACCCAAAATGTCTCCAGA
CATTGCCAATTGCCTCTGGTTGAGACCCACTGATTTATGGAAATCAAAAG
AATAATCATTTCCAAAAGCCTGACAGCAAACAGCAAAGTCCAAAAATAAA
ATGAGAACAAGACCATTGGCTTTGGTGGTTGGAGGTCATGAGATACCTTC
AAGAAAGCACCCTCTATAATATCAAGTCCATGTAGAAGACGTTACAGAGG
AAACAAACAATATAAAAGTGAAAACAACCAAGGGTGAGCTACTCTCAGAA
AGTATGCCTTTGAAAAGAAAGTCAGAAGCCATAGCTTGGGATCTCTGCAG
ATCCCTAAAAGAATAGATTCCTATTCTACTGACTTTCTATGAAGATCAAA
TTGTAAAAAGCAAAAGTTTCTCTCCAAGGGTTTCCTTTGCAGTGACCTGT
ATGTCCAACCACGCAAGGGCCCATTGTGGGGACATATGTTGTCCAAAAGG
ACCATAGCAGAGACAGGCCAGTGAGCCAAAGTGTGGAAACTTTTGAGACT
GGCTTGAGCTTGGCACTTATAGAACAATAAACCAAGCCTTTGAAGGGGTT
CAACAAAGGAACCATTTGTCCACTCTAGTAGCTACAAAGTAAGGCAGGGT
TGCAGCAAAGAACAAAAAAATAAAAGAAGGCCAAGCTGGAGGTATGACCA
AAGTTTACTAGGTCCATTCTGAGACCTTCTGCTAGGGTCTGAGATCTAGA
AGACAGTGAATAAGGAAACAAACCCAAAACTCAACGCAACACAGGATATG
GAAGCTCTCAGGCCTGACGTTAACAGCATCTACTATTTTTCTTCTCAGCT
ACTTTAATGAATGCAGTATACTAAAAGCCAGGAGGGGAAGGGACAACACT
AAGCAAAAAACATGCATTTTTTAAAATGCACAGATTTTCTTCACTGCCGT
TTTTGTTATCATTCCTATGAATTAGTGATGCCGAATTTCATTTTCTCATC
TGCTGAAGAGCTTTCCTGTGTTCCTCTCGTTGGAACACATGCTTGGCATT
AAAATGCTTGTGAGAACTTCTCTTCCTTTAACGTTCCCTGGCTAGCTTGG
TTTTTAATCTAACAGCCCTTCTTTCAAAATGATCCTTCCACTGGAGATAG
ATATTTATCATTCTCTTCCTTCACCTCATCTCTTGACAGGCCGCACGTGA
CTTGAAGGAATTTTTCAAATAGCAGCTCAGCCACCCTGAGGGGCTTCAGT
CTCACCCCTAAGTTCGCTGGCTTTTTCTTCACCACGTCCAGTTGCTTTCC
ATCTTATTAACTGCTCTTTTCACTAGAGGACCAACTCAGTAGGAAATTTT
TTGAGAGGTGGAGAAAGAGATGTTCAAAGAAGGTGTTGGGGTCGGGGGAA
ACTGGTTTTATTTTATACAAGTCACACATTCTGAATCTTCCCTTTTGTGT
CTCTGGGGAGAAAGGAGAAAGTTTGATCAAATCGCTCATTATTTCTGCAC
TTCTTTCTTTTTTCCTAAGTATAAAAATATATGACTACTACTACTGTGAG
ACTATGTGATTGTGAGAATGAATGATTCTTTTTTTTTTTTTTTTTTTTTT
GAAACGGAGTCTCTCGCTGTCACCCAGGCTGGAGTGCAGTAGCACGATCT
TGGCTCACTGCAACATCTGCCTCCCGGGTTCAAGCAATTCTCCTGCCTCA
GCCTCCTGAGTAGCTGGGACTACAGGTGCGCTCCACCACCCCCAGCTAAT
TTTTGTATTTTTAGTGGAGACGGGGTTTCACCATGTTGGTCAGGCTGGTC
TTGAACTCCTGACCTCATGATCCTCTCACCTCGGCCTCACAAAGTGCTAG
GATTACAGGCGCATGGCCAAGAATGAATGATTATTTGTGCCTTCCTATGT
GAAAAAAAAATGTTTCCTCTAGCTACACACTATTCTGTTCTGTGAGGCCG
CCCCATCAGACTGTTGACCTAGAGTCCCAACCCCGGCCCTCCAGGAGACC
TGCCTGTTCTTAGAAGCCCAACCCACTCAGCAGCAGCTCCAAATAACAGG
GGGAGCCAACAAAAAAGAGTGCTGCTAGAGCAACAAGCAAGGGGCAATTA
GTCAGAAGGCAACTTCCATGGTCTTCCAAAAAAAATTGAGGTGAAAGACC
AAAGATGTCCCTAAAATGTCTTCCTAAAAGATAAACTTCATCAACTACCT
CTGACTGGTCAGTATTAAGAACCACTTTCAGGCCAGGTGTCATGGTTCAC
GCCTGTAACTCCATCTACTCCAGAGGCTGAGGCAGGACAATTGCTTCAGG
CCGGAGGATTGCTTGAGGCCAGGAGCTGGAGACCAAGCCTGAGCAACACA
GTGAGACCTCATCTCTACCAAAAATGTACCTCTATTAAAAAACAAAAAAG
AAGAAGAAGAAGAAGAAGAAGGAGAGGAGGCTGGGTATGGTGGCTAATGC
CTTTGTAATCCCAGAACTTTGGAAGGCTGAGGCAGGAGAATCACTTAGGC
TGAGGCAGGAGAATCACCAGAGTCTAGGAGTTTGAGACCAGCCTGGGCAA
CATAGTGAGACCCCCATCTCTACAAAAAAAAAAATTCAAAAATTAGCCAA
GCGTGGGGTTTGTGCCTGTAGACCCAACTACTCAGGAGGCTCAGGTAGGA
GGATCACCTGAGTCCAGGGAGGTCGAGGCTGCAGTGAGTCATGATTATTC
CACTGCCTTCCAGCCTAGACTACAGGGTGAGACCCTGTCTTAAAAAAAAA
ATTAAAGAAGAAAAAACTCTCTTTTCTTTTCTTTCTTTCTTCTTCTTCTT
TTCTTTTTTTTTTTTTCTTTTTTTTTTTTTAGAGATGGCACGTCACCACA
TTGCCCAGGCTGTTGTCGAACTCCTGGCCTCAAACGATGCTCCCACTTGA
GCCTCCCAAAGTGCTGGGACTACAAGCATAAGCCACCACACACGGCCTTT
TCCTTTCTTTTTCTATTTCTCAATGGATTTTTCCAATGGACACGTATCAC
TTTGGTAGTTATACATGATACTAGTTGTAATCTCAGCCATTTTTCAACCC
AGCAAATGTCTATTCTAGGTCAAATATGTCTCAAAAATTACTAAAAGAAA
ATCAGTTATGTCCTTTAACCTGGCTGAGGTCTGGCTTTGTTTTCTCTCAT
GTAAAAATGGAGATGGCACAAAACAACTCCAAGCTGTTACTTGAAAGTAA
CACCTCAGGTGATGTCACCAGCCTGAGGGAGAGTGAGGTTAAGTTCTGAA
CCCACAGGCATTATATCTGCCTGGGGTTCACATGCCCTACACTGGACTGG
CATAATTTGAGAGTCAGATCCGAAGATGTGGTATATCCGCCATCTTTAGC
AACTTTCAAAAACTACCCTATGAGGTCAAGCTGGACCTACTTTTGGTTTT
GCCATTGTTGTTTGTTTGTTGTTGAGGGTTTTCTTTGAGGGGCGGGGAGT
GCATGCCCCTGTGGAGAGCACTCATTTAGCTTCAATTAGAGTAATGCCAA
AAGTGCCAGATTCCTGGGAAATCAGCCTACAAGGCTCCTGCGGGAAGGAA
CCTCCACTGCCAGAAGTCCTTAGGGCATCTAAGTGATCAGACACCGTCAG
GGATTCTTTGCCCCGTAAAAACCTACTTGACCAGGGACACGTGCCAGGTA
AATTTCCTTCACATTTACTTCAACCTTATTGCATACTCATTTTAGTATTA
AAACCTTTAATAAAATGCTCCTATTCCTTCACACTTTTTTTCTATGAGAT
CTCAAATACCCCTTCTTGCTATTAAAAAAAATCACTTATTATTCACCAGC
CCAATATTTTAAAAGTAAAAATAATAAGCCAAGGCCAGGAGCGATGACTC
GCACTTGTATTCCCAGCAGTTTCAGAGGCAAAGGCCGAAGGATCGCTTTA
ACCGAGGAGTTTGAGACCAGCCTGGGCAACATGACCAGACTGCCTCTCTA
CAAAAAGTTTAAAAAATTAACCGGGTGTGGTGGTGCACTGCACTCCCAGC
TACTGGGCTGGGGTATCAGGCTGAGGTAGGAGGTTTGCTTTGAGCCCGGG
GGGATCGAGGCTGCAGTGAGCTTTGATTGTGCCACTGCACTCCAGCCTGG
GTGACAGAAGGAGACCCTGTCTCAAAAATAATAAGAATAATAATTAATAA
TAATAGGCCAAACCAAATACCCATCACCTTCTGCTGTGCCTCCCCTTTCC
CCAATAAATCCAGTGTCTTGCTTTCAAATTTTGTGGTTAAAAAAGATGAT
GAGTTTCTAAGACGTGGGGGCTAAAGCTTGTTTGGCCGTTTTAGGGTTTG
TTGGAATTTTTTTTTCGTCTATGTACTTGTGAATTATTTCACGTTTGCCA
TTACCGGTTCTCCATAGGGTGATGTTCATTAGCAGTGGTGATAGGTTAAT
TTTCACCATCTCTTATGCGGTTGAATAGTCACCTCTGAACCACTTTTTCC
TCCAGTAACTCCTCTTTCTTCGGACCTTCTGCAGCCAACCTGAAAGAATA
ACAAGGAGGTGGCTGGAAACTTGTTTTAAGGAACCGCCTGTCCTTCCCCC
GCTGGAAACCTTGCACCTCGGACGCTCCTGCTCCTGCCCCCACCTGACCC
CCGCCCTCGTTGACATCCAGGCGCGATGATCTCTGCTGCCAGTAGAGGGC
ACACTTACTTTACTTTCGCAAACCTGAACGCGGGTGCTGCCCAGAGAGGG
GGCGGAGGGAAAGACGCTTTGCAGCAAAATCCAGCATAGCGATTGGTTGC
TCCCCGCGTTTGCGGCAAAGGCCTGGAGGCAGGAGTAATTTGCAATCCTT
AAAGCTGAATTGTGCAGTGCATCGGATTTGGAAGCTACTATATTCACTTA
ACACTTGAACGCTGAGCTGCAAACTCAACGGGTAATAACCCATCTTGAAC
AGCGTACATGCTATACACGCACCCCTTTCCCCCGAATTGTTTTCTCTTTT
GGAGGTGGTGGAGGGAGAGAAAAGTTTACTTAAAATGCCTTTGGGTGAGG
GACCAAGGATGAGAAGAATGTTTTTTGTTTTTCATGCCGTGGAATAACAC
AAAATAAAAAATCCCGAGGGAATATACATTATATATTAAATATAGATCAT
TTCAGGGAGCAAACAAATCATGTGTGGGGCTGGGCAACTAGCTAAGTCGA
AGCGTAAATAAAATGTGAATACACGTTTGCGGGTTACATACAGTGCACTT
TCACTAGTATTCAGAAAAAATTGTGAGTCAGTGAACTAGGAAATTAATGC
CTGGAAGGCAGCCAAATTTTAATTAGCTCAAGACTCCCCCCCCCCCAAAA
AAAGGCACGGAAGTAATACTCCTCTCCTCTTCTTTGATCAGAATCGATGC
ATTTTTTGTGCATGACCGCATTTCCAATAATAAAAGGGGAAAGAGGACCT
GGAAAGGAATTAAACGTCCGGTTTGTCCGGGGAGGAAAGAGTTAACGGTT
TTTTTCACAAGGGTCTCTGCTGACTCCCCCGGCTCGGTCCACAAGCTCTC
CACTTGCCCCTTTTAGGAAGTCCGGTCCCGCGGTTCGGGTACCCCCTGCC
CCTCCCATATTCTCCCGTCTAGCACCTTTGATTTCTCCCAAACCCGGCAG
CCCGAGACTGTTGCAAACCGGCGCCACAGGGCGCAAAGGGGATTTGTCTC
TTCTGAAACCTGGCTGAGAAATTGGGAACTCCGTGTGGGAGGCGTGGGGG
TGGGACGGTGGGGTACAGACTGGCAGAGAGCAGGCAACCTCCCTCTCGCC
CTAGCCCAGCTCTGGAACAGGCAGACACATCTCAGGGCTAAACAGACGCC
TCCCGCACGGGGCCCCACGGAAGCCTGAGCAGGCGGGGCAGGAGGGGCGG
TATCTGCTGCTTTGGCAGCAAATTGGGGGACTCAGTCTGGGTGGAAGGTA
TCCAATCCAGATAGCTGTGCATACATAATGCATAATACATGACTCCCCCC
AACAAATGCAATGGGAGTTTATTCATAACGCGCTCTCCAAGTATACGTGG
CAATGCGTTGCTGGGTTATTTTAATCATTCTAGGCATCGTTTTCCTCCTT
ATGCCTCTATCATTCCTCCCTATCTACACTAACATCCCACGCTCTGAACG
CGCGCCCATTAATACCCTTCTTTCCTCCACTCTCCCTGGGACTCTTGATC
AAAGCGCGGCCCTTTCCCCAGCCTTAGCGAGGCGCCCTGCAGCCTGGTAC
GCGCGTGGCGTGGCGGTGGGCGCGCAGTGCGTTCTCGGTGTGGAGGGCAG
CTGTTCCGCCTGCGATGATTTATACTCACAGGACAAGGATGCGGTTTGTC
AAACAGTACTGCTACGGAGGAGCAGCAGAGAAAGGGAGAGGGTTTGAGAG
GGAGCAAAAGAAAATGGTAGGCGCGCGTAGTTAATTCATGCGGCTCTCTT
ACTCTGTTTACATCCTAGAGCTAGAGTGCTCGGCTGCCCGGCTGAGTCTC
CTCCCCACCTTCCCCACCCTCCCCACCCTCCCCATAAGCGCCCCTCCCGG
GTTCCCAAAGCAGAGGGCGTGGGGGAAAAGAAAAAAGATCCTCTCTCGCT
AATCTCCGCCCACCGGCCCTTTATAATGCGAGGGTCTGGACGGCTGAGGA
CCCCCGAGCTGTGCTGCTCGCGGCCGCCACCGCCGGGCCCCGGCCGTCCC
TGGCTCCCCTCCTGCCTCGAGAAGGGCAGGGCTTCTCAGAGGCTTGGCGG
GAAAAAGAACGGAGGGAGGGATCGCGCTGAGTATAAAAGCCGGTTTTCGG
GGCTTTATCTAACTCGCTGTAGTAATTCCAGCGAGAGGCAGAGGGAGCGA
GCGGGCGGCCGGCTAGGGTGGAAGAGCCGGGCGAGCAGAGCTGCGCTGCG
GGCGTCCTGGGAAGGGAGATCCGGAGCGAATAGGGGGCTTCGCCTCTGGC
CCAGCCCTCCCGCTGATCCCCCAGCCAGCGGTCCGCAACCCTTGCCGCAT
CCACGAAACTTTGCCCATAGCAGCGGGCGGGCACTTTGCACTGGAACTTA
CAACACCCGAGCAAGGACGCGACTCTCCCGACGCGGGGAGGCTATTCTGC
CCATTTGGGGACACTTCCCCGCCGCTGCCAGGACCCGCTTCTCTGAAAGG
CTCTCCTTGCAGCTGCTTAGACGCTG

[0437] 31. APP

[0438] Amyloid beta (A4) precursor protein is encoded by the APP gene. The amyloid precursor protein (APP) is found in many tissues and organs, including the brain and spinal cord (central nervous system). Its function is not well understood, however, it is believed to bind other proteins on the surface of cells or help cells attach to one another, thereby directing the migration of nerve cells during early development. APP is cleaved by enzymes to create smaller peptides (soluble amyloid precursor protein (sAPP) and amyloid beta (β) peptide) which may be released outside the cell. sAPP has growth-promoting properties and may play a role in the formation of nerve cells (neurons) in the brain both before and after birth. The sAPP peptide may also control the function of certain other proteins by turning off (inhibiting) their activity. Alzheimer's disease (AD) pathogenesis is widely believed to be driven by the production and deposition of the amyloid-beta peptide (Murphy and Levin (2010) J Alzheimers Dis. 19(1):311-23).

[0439] Protein: Beta Amyloid Gene: APP (Homo sapiens, chromosome 21, 27252861-27543446 [NCBI Reference Sequence: NC_{—}000021.8]; start site location: 27542938; strand: negative)

Gene Identification

| | |
|---|---|
| GeneID | 351 |
| HGNC | 620 |
| MIM | 104760 |

Targeted Sequences

| | | | Relative upstream |
|---|---|---|---|
| Sequence | Design | | location to gene start |
| ID No: | ID | Sequence (5′-3′) | site |
| 7607 | | CGCGACCCTGCGCGGGGCACCG | 1 |
| 7741 | | GTGCGAGTGGGATCCGCCGCG | 34 |
| 7875 | | CGCGCCGCCACCGCCGCCGTCTCCCGG | 68 |
| 8009 | | CGCGCACGCTCCTCCGCGTGCTCTCG | 101 |
| 8143 | | CCGAGGAAACTGACGGAGCCCGAGCGCGG | 137 |
| 8145 | | CGAGTCAGCTGATCCGGCCCACCCCG | 186 |
| 8310 | | CGAGAGAGACCCCTAGCGGCGCCG | 221 |
| 8475 | | CGCCCGCTCGCGCCGGGAGGGGCCCTCG | 256 |
| 8640 | | CGCGCCCACAGGTGCACGCGCCCTTGGCG | 289 |
| 8805 | | GGCCGACGGCCCACCTGGGCTTCG | 351 |
| 8825 | | CGCTGAGGCTCTAGAAAAGTCGAGAG | 446 |
| 8843 | | CTCGTCCCCGTGAGCTTGAATCATCCGACCC | 480 |
| 8912 | | AGGCGTTTCTGGAAGAGAATGAGAACG | 604 |
| 8927 | | CGTCAAAAGCAGGCACGAGCAACCTG | 701 |
| 8928 | | GAACGAACCAAAGGAGCAAGGCG | 742 |
| 8929 | | CGCTGACAAGGGTGCCTAGGCCCGG | 1318 |
| 8948 | | CGCAATTCCGTATTTGTTCCGG | 1738 |
| 8969 | | GTACGTTGGCAGACGCAGTGACG | 4923 |

Target Shift Sequences

| | | Relative |
|---|---|---|
| | | upstream |
| | | location to |
| Sequence | | gene start |
| ID No: | Sequence (5′-3′) | site |
| 7607 | CGCGACCCTGCGCGGGGCACCG | 1 |
| 7608 | GCGACCCTGCGCGGGGCACC | 2 |
| 7609 | CGACCCTGCGCGGGGCACCG | 3 |
| 7610 | GACCCTGCGCGGGGCACCGA | 4 |
| 7611 | ACCCTGCGCGGGGCACCGAG | 5 |
| 7612 | CCCTGCGCGGGGCACCGAGT | 6 |
| 7613 | CCTGCGCGGGGCACCGAGTG | 7 |
| 7614 | CTGCGCGGGGCACCGAGTGC | 8 |
| 7615 | TGCGCGGGGCACCGAGTGCG | 9 |
| 7616 | GCGCGGGGCACCGAGTGCGC | 10 |
| 7617 | CGCGGGGCACCGAGTGCGCT | 11 |
| 7618 | GCGGGGCACCGAGTGCGCTG | 12 |
| 7619 | CGGGGCACCGAGTGCGCTGC | 13 |
| 7620 | GGGGCACCGAGTGCGCTGCT | 14 |
| 7621 | GGGCACCGAGTGCGCTGCTG | 15 |
| 7622 | GGCACCGAGTGCGCTGCTGT | 16 |
| 7623 | GCACCGAGTGCGCTGCTGTG | 17 |
| 7624 | CACCGAGTGCGCTGCTGTGC | 18 |
| 7625 | ACCGAGTGCGCTGCTGTGCG | 19 |
| 7626 | CCGAGTGCGCTGCTGTGCGA | 20 |
| 7627 | CGAGTGCGCTGCTGTGCGAG | 21 |
| 7628 | GAGTGCGCTGCTGTGCGAGT | 22 |
| 7629 | AGTGCGCTGCTGTGCGAGTG | 23 |
| 7630 | GTGCGCTGCTGTGCGAGTGG | 24 |
| 7631 | TGCGCTGCTGTGCGAGTGGG | 25 |
| 7632 | GCGCTGCTGTGCGAGTGGGA | 26 |
| 7633 | CGCTGCTGTGCGAGTGGGAT | 27 |
| 7634 | GCTGCTGTGCGAGTGGGATC | 28 |
| 7635 | CTGCTGTGCGAGTGGGATCC | 29 |
| 7636 | TGCTGTGCGAGTGGGATCCG | 30 |
| 7637 | GCTGTGCGAGTGGGATCCGC | 31 |
| 7638 | CTGTGCGAGTGGGATCCGCC | 32 |
| 7639 | TGTGCGAGTGGGATCCGCCG | 33 |
| 7640 | GTGCGAGTGGGATCCGCCGC | 34 |
| 7641 | TGCGAGTGGGATCCGCCGCG | 35 |
| 7642 | GCGAGTGGGATCCGCCGCGT | 36 |
| 7643 | CGAGTGGGATCCGCCGCGTC | 37 |
| 7644 | GAGTGGGATCCGCCGCGTCC | 38 |
| 7645 | AGTGGGATCCGCCGCGTCCT | 39 |
| 7646 | GTGGGATCCGCCGCGTCCTT | 40 |
| 7647 | TGGGATCCGCCGCGTCCTTG | 41 |
| 7648 | GGGATCCGCCGCGTCCTTGC | 42 |
| 7649 | GGATCCGCCGCGTCCTTGCT | 43 |
| 7650 | GATCCGCCGCGTCCTTGCTC | 44 |
| 7651 | ATCCGCCGCGTCCTTGCTCT | 45 |
| 7652 | TCCGCCGCGTCCTTGCTCTG | 46 |
| 7653 | CCGCCGCGTCCTTGCTCTGC | 47 |
| 7654 | CGCCGCGTCCTTGCTCTGCC | 48 |
| 7655 | GCCGCGTCCTTGCTCTGCCC | 49 |
| 7656 | CCGCGTCCTTGCTCTGCCCG | 50 |
| 7657 | CGCGTCCTTGCTCTGCCCGC | 51 |
| 7658 | GCGTCCTTGCTCTGCCCGCG | 52 |
| 7659 | CGTCCTTGCTCTGCCCGCGC | 53 |
| 7660 | GTCCTTGCTCTGCCCGCGCC | 54 |
| 7661 | TCCTTGCTCTGCCCGCGCCG | 55 |
| 7662 | CCTTGCTCTGCCCGCGCCGC | 56 |
| 7663 | CTTGCTCTGCCCGCGCCGCC | 57 |
| 7664 | TTGCTCTGCCCGCGCCGCCA | 58 |
| 7665 | TGCTCTGCCCGCGCCGCCAC | 59 |
| 7666 | GCTCTGCCCGCGCCGCCACC | 60 |
| 7667 | CTCTGCCCGCGCCGCCACCG | 61 |
| 7668 | TCTGCCCGCGCCGCCACCGC | 62 |
| 7669 | CTGCCCGCGCCGCCACCGCC | 63 |
| 7670 | TGCCCGCGCCGCCACCGCCG | 64 |
| 7671 | GCCCGCGCCGCCACCGCCGC | 65 |
| 7672 | CCCGCGCCGCCACCGCCGCC | 66 |
| 7673 | CCGCGCCGCCACCGCCGCCG | 67 |
| 7674 | CGCGCCGCCACCGCCGCCGT | 68 |
| 7675 | GCGCCGCCACCGCCGCCGTC | 69 |
| 7676 | CGCCGCCACCGCCGCCGTCT | 70 |
| 7677 | GCCGCCACCGCCGCCGTCTC | 71 |
| 7678 | CCGCCACCGCCGCCGTCTCC | 72 |
| 7679 | CGCCACCGCCGCCGTCTCCC | 73 |
| 7680 | GCCACCGCCGCCGTCTCCCG | 74 |
| 7681 | CCACCGCCGCCGTCTCCCGG | 75 |
| 7682 | CACCGCCGCCGTCTCCCGGG | 76 |
| 7683 | ACCGCCGCCGTCTCCCGGGG | 77 |
| 7684 | CCGCCGCCGTCTCCCGGGGC | 78 |
| 7685 | CGCCGCCGTCTCCCGGGGCC | 79 |
| 7686 | GCCGCCGTCTCCCGGGGCCC | 80 |
| 7687 | CCGCCGTCTCCCGGGGCCCC | 81 |
| 7688 | CGCCGTCTCCCGGGGCCCCC | 82 |
| 7689 | GCCGTCTCCCGGGGCCCCCG | 83 |
| 7690 | CCGTCTCCCGGGGCCCCCGC | 84 |
| 7691 | CGTCTCCCGGGGCCCCCGCG | 85 |
| 7692 | GTCTCCCGGGGCCCCCGCGC | 86 |
| 7693 | TCTCCCGGGGCCCCCGCGCA | 87 |
| 7694 | CTCCCGGGGCCCCCGCGCAC | 88 |
| 7695 | TCCCGGGGCCCCCGCGCACG | 89 |
| 7696 | CCCGGGGCCCCCGCGCACGC | 90 |
| 7697 | CCGGGGCCCCCGCGCACGCT | 91 |
| 7698 | CGGGGCCCCCGCGCACGCTC | 92 |
| 7699 | GGGGCCCCCGCGCACGCTCC | 93 |
| 7700 | GGGCCCCCGCGCACGCTCCT | 94 |
| 7701 | GGCCCCCGCGCACGCTCCTC | 95 |
| 7702 | GCCCCCGCGCACGCTCCTCC | 96 |
| 7703 | CCCCCGCGCACGCTCCTCCG | 97 |
| 7704 | CCCCGCGCACGCTCCTCCGC | 98 |
| 7705 | CCCGCGCACGCTCCTCCGCG | 99 |
| 7706 | CCGCGCACGCTCCTCCGCGT | 100 |
| 7707 | CGCGCACGCTCCTCCGCGTG | 101 |
| 7708 | GCGCACGCTCCTCCGCGTGC | 102 |
| 7709 | CGCACGCTCCTCCGCGTGCT | 103 |
| 7710 | GCACGCTCCTCCGCGTGCTC | 104 |
| 7711 | CACGCTCCTCCGCGTGCTCT | 105 |
| 7712 | ACGCTCCTCCGCGTGCTCTC | 106 |
| 7713 | CGCTCCTCCGCGTGCTCTCG | 107 |
| 7714 | GCTCCTCCGCGTGCTCTCGC | 108 |
| 7715 | CTCCTCCGCGTGCTCTCGCC | 109 |
| 7716 | TCCTCCGCGTGCTCTCGCCT | 110 |
| 7717 | CCTCCGCGTGCTCTCGCCTA | 111 |
| 7718 | CTCCGCGTGCTCTCGCCTAC | 112 |
| 7719 | TCCGCGTGCTCTCGCCTACC | 113 |
| 7720 | CCGCGTGCTCTCGCCTACCG | 114 |
| 7721 | CGCGTGCTCTCGCCTACCGC | 115 |
| 7722 | GCGTGCTCTCGCCTACCGCT | 116 |
| 7723 | CGTGCTCTCGCCTACCGCTG | 117 |
| 7724 | GTGCTCTCGCCTACCGCTGC | 118 |
| 7725 | TGCTCTCGCCTACCGCTGCC | 119 |
| 7726 | GCTCTCGCCTACCGCTGCCG | 120 |
| 7727 | CTCTCGCCTACCGCTGCCGA | 121 |
| 7728 | TCTCGCCTACCGCTGCCGAG | 122 |
| 7729 | CTCGCCTACCGCTGCCGAGG | 123 |
| 7730 | TCGCCTACCGCTGCCGAGGA | 124 |
| 7731 | CGCCTACCGCTGCCGAGGAA | 125 |
| 7732 | GCCTACCGCTGCCGAGGAAA | 126 |
| 7733 | CCTACCGCTGCCGAGGAAAC | 127 |
| 7734 | CTACCGCTGCCGAGGAAACT | 128 |
| 7735 | TACCGCTGCCGAGGAAACTG | 129 |
| 7736 | ACCGCTGCCGAGGAAACTGA | 130 |
| 7737 | CCGCTGCCGAGGAAACTGAC | 131 |
| 7738 | CGCTGCCGAGGAAACTGACG | 132 |
| 7739 | GCTGCCGAGGAAACTGACGG | 133 |
| 7740 | CTGCCGAGGAAACTGACGGA | 134 |
| 7741 | GTGCGAGTGGGATCCGCCGCG | 34 |
| 7742 | TGCGAGTGGGATCCGCCGCG | 35 |
| 7743 | GCGAGTGGGATCCGCCGCGT | 36 |
| 7744 | CGAGTGGGATCCGCCGCGTC | 37 |
| 7745 | GAGTGGGATCCGCCGCGTCC | 38 |
| 7746 | AGTGGGATCCGCCGCGTCCT | 39 |
| 7747 | GTGGGATCCGCCGCGTCCTT | 40 |
| 7748 | TGGGATCCGCCGCGTCCTTG | 41 |
| 7749 | GGGATCCGCCGCGTCCTTGC | 42 |
| 7750 | GGATCCGCCGCGTCCTTGCT | 43 |
| 7751 | GATCCGCCGCGTCCTTGCTC | 44 |
| 7752 | ATCCGCCGCGTCCTTGCTCT | 45 |
| 7753 | TCCGCCGCGTCCTTGCTCTG | 46 |
| 7754 | CCGCCGCGTCCTTGCTCTGC | 47 |
| 7755 | CGCCGCGTCCTTGCTCTGCC | 48 |
| 7756 | GCCGCGTCCTTGCTCTGCCC | 49 |
| 7757 | CCGCGTCCTTGCTCTGCCCG | 50 |
| 7758 | CGCGTCCTTGCTCTGCCCGC | 51 |
| 7759 | GCGTCCTTGCTCTGCCCGCG | 52 |
| 7760 | CGTCCTTGCTCTGCCCGCGC | 53 |
| 7761 | GTCCTTGCTCTGCCCGCGCC | 54 |
| 7762 | TCCTTGCTCTGCCCGCGCCG | 55 |
| 7763 | CCTTGCTCTGCCCGCGCCGC | 56 |
| 7764 | CTTGCTCTGCCCGCGCCGCC | 57 |
| 7765 | TTGCTCTGCCCGCGCCGCCA | 58 |
| 7766 | TGCTCTGCCCGCGCCGCCAC | 59 |
| 7767 | GCTCTGCCCGCGCCGCCACC | 60 |
| 7768 | CTCTGCCCGCGCCGCCACCG | 61 |
| 7769 | TCTGCCCGCGCCGCCACCGC | 62 |
| 7770 | CTGCCCGCGCCGCCACCGCC | 63 |
| 7771 | TGCCCGCGCCGCCACCGCCG | 64 |
| 7772 | GCCCGCGCCGCCACCGCCGC | 65 |
| 7773 | CCCGCGCCGCCACCGCCGCC | 66 |
| 7774 | CCGCGCCGCCACCGCCGCCG | 67 |
| 7775 | CGCGCCGCCACCGCCGCCGT | 68 |
| 7776 | GCGCCGCCACCGCCGCCGTC | 69 |
| 7777 | CGCCGCCACCGCCGCCGTCT | 70 |
| 7778 | GCCGCCACCGCCGCCGTCTC | 71 |
| 7779 | CCGCCACCGCCGCCGTCTCC | 72 |
| 7780 | CGCCACCGCCGCCGTCTCCC | 73 |
| 7781 | GCCACCGCCGCCGTCTCCCG | 74 |
| 7782 | CCACCGCCGCCGTCTCCCGG | 75 |
| 7783 | CACCGCCGCCGTCTCCCGGG | 76 |
| 7784 | ACCGCCGCCGTCTCCCGGGG | 77 |
| 7785 | CCGCCGCCGTCTCCCGGGGC | 78 |
| 7786 | CGCCGCCGTCTCCCGGGGCC | 79 |
| 7787 | GCCGCCGTCTCCCGGGGCCC | 80 |
| 7788 | CCGCCGTCTCCCGGGGCCCC | 81 |
| 7789 | CGCCGTCTCCCGGGGCCCCC | 82 |
| 7790 | GCCGTCTCCCGGGGCCCCCG | 83 |
| 7791 | CCGTCTCCCGGGGCCCCCGC | 84 |
| 7792 | CGTCTCCCGGGGCCCCCGCG | 85 |
| 7793 | GTCTCCCGGGGCCCCCGCGC | 86 |
| 7794 | TCTCCCGGGGCCCCCGCGCA | 87 |
| 7795 | CTCCCGGGGCCCCCGCGCAC | 88 |
| 7796 | TCCCGGGGCCCCCGCGCACG | 89 |
| 7797 | CCCGGGGCCCCCGCGCACGC | 90 |
| 7798 | CCGGGGCCCCCGCGCACGCT | 91 |
| 7799 | CGGGGCCCCCGCGCACGCTC | 92 |
| 7800 | GGGGCCCCCGCGCACGCTCC | 93 |
| 7801 | GGGCCCCCGCGCACGCTCCT | 94 |
| 7802 | GGCCCCCGCGCACGCTCCTC | 95 |
| 7803 | GCCCCCGCGCACGCTCCTCC | 96 |
| 7804 | CCCCCGCGCACGCTCCTCCG | 97 |
| 7805 | CCCCGCGCACGCTCCTCCGC | 98 |
| 7806 | CCCGCGCACGCTCCTCCGCG | 99 |
| 7807 | CCGCGCACGCTCCTCCGCGT | 100 |
| 7808 | CGCGCACGCTCCTCCGCGTG | 101 |
| 7809 | GCGCACGCTCCTCCGCGTGC | 102 |
| 7810 | CGCACGCTCCTCCGCGTGCT | 103 |
| 7811 | GCACGCTCCTCCGCGTGCTC | 104 |
| 7812 | CACGCTCCTCCGCGTGCTCT | 105 |
| 7813 | ACGCTCCTCCGCGTGCTCTC | 106 |
| 7814 | CGCTCCTCCGCGTGCTCTCG | 107 |
| 7815 | GCTCCTCCGCGTGCTCTCGC | 108 |
| 7816 | CTCCTCCGCGTGCTCTCGCC | 109 |
| 7817 | TCCTCCGCGTGCTCTCGCCT | 110 |
| 7818 | CCTCCGCGTGCTCTCGCCTA | 111 |
| 7819 | CTCCGCGTGCTCTCGCCTAC | 112 |
| 7820 | TCCGCGTGCTCTCGCCTACC | 113 |
| 7821 | CCGCGTGCTCTCGCCTACCG | 114 |
| 7822 | CGCGTGCTCTCGCCTACCGC | 115 |
| 7823 | GCGTGCTCTCGCCTACCGCT | 116 |
| 7824 | CGTGCTCTCGCCTACCGCTG | 117 |
| 7825 | GTGCTCTCGCCTACCGCTGC | 118 |
| 7826 | TGCTCTCGCCTACCGCTGCC | 119 |
| 7827 | GCTCTCGCCTACCGCTGCCG | 120 |
| 7828 | CTCTCGCCTACCGCTGCCGA | 121 |
| 7829 | TCTCGCCTACCGCTGCCGAG | 122 |
| 7830 | CTCGCCTACCGCTGCCGAGG | 123 |
| 7831 | TCGCCTACCGCTGCCGAGGA | 124 |
| 7832 | CGCCTACCGCTGCCGAGGAA | 125 |
| 7833 | GCCTACCGCTGCCGAGGAAA | 126 |
| 7834 | CCTACCGCTGCCGAGGAAAC | 127 |
| 7835 | CTACCGCTGCCGAGGAAACT | 128 |
| 7836 | TACCGCTGCCGAGGAAACTG | 129 |
| 7837 | ACCGCTGCCGAGGAAACTGA | 130 |
| 7838 | CCGCTGCCGAGGAAACTGAC | 131 |
| 7839 | CGCTGCCGAGGAAACTGACG | 132 |
| 7840 | GCTGCCGAGGAAACTGACGG | 133 |
| 7841 | CTGCCGAGGAAACTGACGGA | 134 |
| 7842 | TGTGCGAGTGGGATCCGCCG | 33 |
| 7843 | CTGTGCGAGTGGGATCCGCC | 32 |
| 7844 | GCTGTGCGAGTGGGATCCGC | 31 |
| 7845 | TGCTGTGCGAGTGGGATCCG | 30 |
| 7846 | CTGCTGTGCGAGTGGGATCC | 29 |
| 7847 | GCTGCTGTGCGAGTGGGATC | 28 |
| 7848 | CGCTGCTGTGCGAGTGGGAT | 27 |
| 7849 | GCGCTGCTGTGCGAGTGGGA | 26 |
| 7850 | TGCGCTGCTGTGCGAGTGGG | 25 |
| 7851 | GTGCGCTGCTGTGCGAGTGG | 24 |
| 7852 | AGTGCGCTGCTGTGCGAGTG | 23 |
| 7853 | GAGTGCGCTGCTGTGCGAGT | 22 |
| 7854 | CGAGTGCGCTGCTGTGCGAG | 21 |
| 7855 | CCGAGTGCGCTGCTGTGCGA | 20 |
| 7856 | ACCGAGTGCGCTGCTGTGCG | 19 |
| 7857 | CACCGAGTGCGCTGCTGTGC | 18 |
| 7858 | GCACCGAGTGCGCTGCTGTG | 17 |
| 7859 | GGCACCGAGTGCGCTGCTGT | 16 |
| 7860 | GGGCACCGAGTGCGCTGCTG | 15 |
| 7861 | GGGGCACCGAGTGCGCTGCT | 14 |
| 7862 | CGGGGCACCGAGTGCGCTGC | 13 |
| 7863 | GCGGGGCACCGAGTGCGCTG | 12 |
| 7864 | CGCGGGGCACCGAGTGCGCT | 11 |
| 7865 | GCGCGGGGCACCGAGTGCGC | 10 |
| 7866 | TGCGCGGGGCACCGAGTGCG | 9 |
| 7867 | CTGCGCGGGGCACCGAGTGC | 8 |
| 7868 | CCTGCGCGGGGCACCGAGTG | 7 |
| 7869 | CCCTGCGCGGGGCACCGAGT | 6 |
| 7870 | ACCCTGCGCGGGGCACCGAG | 5 |
| 7871 | GACCCTGCGCGGGGCACCGA | 4 |
| 7872 | CGACCCTGCGCGGGGCACCG | 3 |
| 7873 | GCGACCCTGCGCGGGGCACC | 2 |
| 7874 | CGCGACCCTGCGCGGGGCAC | 1 |
| 7875 | CGCGCCGCCACCGCCGCCGTCTCCCGG | 68 |
| 7876 | GCGCCGCCACCGCCGCCGTC | 69 |
| 7877 | CGCCGCCACCGCCGCCGTCT | 70 |
| 7878 | GCCGCCACCGCCGCCGTCTC | 71 |
| 7879 | CCGCCACCGCCGCCGTCTCC | 72 |
| 7880 | CGCCACCGCCGCCGTCTCCC | 73 |
| 7881 | GCCACCGCCGCCGTCTCCCG | 74 |
| 7882 | CCACCGCCGCCGTCTCCCGG | 75 |
| 7883 | CACCGCCGCCGTCTCCCGGG | 76 |
| 7884 | ACCGCCGCCGTCTCCCGGGG | 77 |
| 7885 | CCGCCGCCGTCTCCCGGGGC | 78 |
| 7886 | CGCCGCCGTCTCCCGGGGCC | 79 |
| 7887 | GCCGCCGTCTCCCGGGGCCC | 80 |
| 7888 | CCGCCGTCTCCCGGGGCCCC | 81 |
| 7889 | CGCCGTCTCCCGGGGCCCCC | 82 |
| 7890 | GCCGTCTCCCGGGGCCCCCG | 83 |
| 7891 | CCGTCTCCCGGGGCCCCCGC | 84 |
| 7892 | CGTCTCCCGGGGCCCCCGCG | 85 |
| 7893 | GTCTCCCGGGGCCCCCGCGC | 86 |
| 7894 | TCTCCCGGGGCCCCCGCGCA | 87 |
| 7895 | CTCCCGGGGCCCCCGCGCAC | 88 |
| 7896 | TCCCGGGGCCCCCGCGCACG | 89 |
| 7897 | CCCGGGGCCCCCGCGCACGC | 90 |
| 7898 | CCGGGGCCCCCGCGCACGCT | 91 |
| 7899 | CGGGGCCCCCGCGCACGCTC | 92 |
| 7900 | GGGGCCCCCGCGCACGCTCC | 93 |
| 7901 | GGGCCCCCGCGCACGCTCCT | 94 |
| 7902 | GGCCCCCGCGCACGCTCCTC | 95 |
| 7903 | GCCCCCGCGCACGCTCCTCC | 96 |
| 7904 | CCCCCGCGCACGCTCCTCCG | 97 |
| 7905 | CCCCGCGCACGCTCCTCCGC | 98 |
| 7906 | CCCGCGCACGCTCCTCCGCG | 99 |
| 7907 | CCGCGCACGCTCCTCCGCGT | 100 |
| 7908 | CGCGCACGCTCCTCCGCGTG | 101 |
| 7909 | GCGCACGCTCCTCCGCGTGC | 102 |
| 7910 | CGCACGCTCCTCCGCGTGCT | 103 |
| 7911 | GCACGCTCCTCCGCGTGCTC | 104 |
| 7912 | CACGCTCCTCCGCGTGCTCT | 105 |
| 7913 | ACGCTCCTCCGCGTGCTCTC | 106 |
| 7914 | CGCTCCTCCGCGTGCTCTCG | 107 |
| 7915 | GCTCCTCCGCGTGCTCTCGC | 108 |
| 7916 | CTCCTCCGCGTGCTCTCGCC | 109 |
| 7917 | TCCTCCGCGTGCTCTCGCCT | 110 |
| 7918 | CCTCCGCGTGCTCTCGCCTA | 111 |
| 7919 | CTCCGCGTGCTCTCGCCTAC | 112 |
| 7920 | TCCGCGTGCTCTCGCCTACC | 113 |
| 7921 | CCGCGTGCTCTCGCCTACCG | 114 |
| 7922 | CGCGTGCTCTCGCCTACCGC | 115 |
| 7923 | GCGTGCTCTCGCCTACCGCT | 116 |
| 7924 | CGTGCTCTCGCCTACCGCTG | 117 |
| 7925 | GTGCTCTCGCCTACCGCTGC | 118 |
| 7926 | TGCTCTCGCCTACCGCTGCC | 119 |
| 7927 | GCTCTCGCCTACCGCTGCCG | 120 |
| 7928 | CTCTCGCCTACCGCTGCCGA | 121 |
| 7929 | TCTCGCCTACCGCTGCCGAG | 122 |
| 7930 | CTCGCCTACCGCTGCCGAGG | 123 |
| 7931 | TCGCCTACCGCTGCCGAGGA | 124 |
| 7932 | CGCCTACCGCTGCCGAGGAA | 125 |
| 7933 | GCCTACCGCTGCCGAGGAAA | 126 |
| 7934 | CCTACCGCTGCCGAGGAAAC | 127 |
| 7935 | CTACCGCTGCCGAGGAAACT | 128 |
| 7936 | TACCGCTGCCGAGGAAACTG | 129 |
| 7937 | ACCGCTGCCGAGGAAACTGA | 130 |
| 7938 | CCGCTGCCGAGGAAACTGAC | 131 |
| 7939 | CGCTGCCGAGGAAACTGACG | 132 |
| 7940 | GCTGCCGAGGAAACTGACGG | 133 |
| 7941 | CTGCCGAGGAAACTGACGGA | 134 |
| 7942 | CCGCGCCGCCACCGCCGCCG | 67 |
| 7943 | CCCGCGCCGCCACCGCCGCC | 66 |
| 7944 | GCCCGCGCCGCCACCGCCGC | 65 |
| 7945 | TGCCCGCGCCGCCACCGCCG | 64 |
| 7946 | CTGCCCGCGCCGCCACCGCC | 63 |
| 7947 | TCTGCCCGCGCCGCCACCGC | 62 |
| 7948 | CTCTGCCCGCGCCGCCACCG | 61 |
| 7949 | GCTCTGCCCGCGCCGCCACC | 60 |
| 7950 | TGCTCTGCCCGCGCCGCCAC | 59 |
| 7951 | TTGCTCTGCCCGCGCCGCCA | 58 |
| 7952 | CTTGCTCTGCCCGCGCCGCC | 57 |
| 7953 | CCTTGCTCTGCCCGCGCCGC | 56 |
| 7954 | TCCTTGCTCTGCCCGCGCCG | 55 |
| 7955 | GTCCTTGCTCTGCCCGCGCC | 54 |
| 7956 | CGTCCTTGCTCTGCCCGCGC | 53 |
| 7957 | GCGTCCTTGCTCTGCCCGCG | 52 |
| 7958 | CGCGTCCTTGCTCTGCCCGC | 51 |
| 7959 | CCGCGTCCTTGCTCTGCCCG | 50 |
| 7960 | GCCGCGTCCTTGCTCTGCCC | 49 |
| 7961 | CGCCGCGTCCTTGCTCTGCC | 48 |
| 7962 | CCGCCGCGTCCTTGCTCTGC | 47 |
| 7963 | TCCGCCGCGTCCTTGCTCTG | 46 |
| 7964 | ATCCGCCGCGTCCTTGCTCT | 45 |
| 7965 | GATCCGCCGCGTCCTTGCTC | 44 |
| 7966 | GGATCCGCCGCGTCCTTGCT | 43 |
| 7967 | GGGATCCGCCGCGTCCTTGC | 42 |
| 7968 | TGGGATCCGCCGCGTCCTTG | 41 |
| 7969 | GTGGGATCCGCCGCGTCCTT | 40 |
| 7970 | AGTGGGATCCGCCGCGTCCT | 39 |
| 7971 | GAGTGGGATCCGCCGCGTCC | 38 |
| 7972 | CGAGTGGGATCCGCCGCGTC | 37 |
| 7973 | GCGAGTGGGATCCGCCGCGT | 36 |
| 7974 | TGCGAGTGGGATCCGCCGCG | 35 |
| 7975 | GTGCGAGTGGGATCCGCCGC | 34 |
| 7976 | TGTGCGAGTGGGATCCGCCG | 33 |
| 7977 | CTGTGCGAGTGGGATCCGCC | 32 |
| 7978 | GCTGTGCGAGTGGGATCCGC | 31 |
| 7979 | TGCTGTGCGAGTGGGATCCG | 30 |
| 7980 | CTGCTGTGCGAGTGGGATCC | 29 |
| 7981 | GCTGCTGTGCGAGTGGGATC | 28 |
| 7982 | CGCTGCTGTGCGAGTGGGAT | 27 |
| 7983 | GCGCTGCTGTGCGAGTGGGA | 26 |
| 7984 | TGCGCTGCTGTGCGAGTGGG | 25 |
| 7985 | GTGCGCTGCTGTGCGAGTGG | 24 |
| 7986 | AGTGCGCTGCTGTGCGAGTG | 23 |
| 7987 | GAGTGCGCTGCTGTGCGAGT | 22 |
| 7988 | CGAGTGCGCTGCTGTGCGAG | 21 |
| 7989 | CCGAGTGCGCTGCTGTGCGA | 20 |
| 7990 | ACCGAGTGCGCTGCTGTGCG | 19 |
| 7991 | CACCGAGTGCGCTGCTGTGC | 18 |
| 7992 | GCACCGAGTGCGCTGCTGTG | 17 |
| 7993 | GGCACCGAGTGCGCTGCTGT | 16 |
| 7994 | GGGCACCGAGTGCGCTGCTG | 15 |
| 7995 | GGGGCACCGAGTGCGCTGCT | 14 |
| 7996 | CGGGGCACCGAGTGCGCTGC | 13 |
| 7997 | GCGGGGCACCGAGTGCGCTG | 12 |
| 7998 | CGCGGGGCACCGAGTGCGCT | 11 |
| 7999 | GCGCGGGGCACCGAGTGCGC | 10 |
| 8000 | TGCGCGGGGCACCGAGTGCG | 9 |
| 8001 | CTGCGCGGGGCACCGAGTGC | 8 |
| 8002 | CCTGCGCGGGGCACCGAGTG | 7 |
| 8003 | CCCTGCGCGGGGCACCGAGT | 6 |
| 8004 | ACCCTGCGCGGGGCACCGAG | 5 |
| 8005 | GACCCTGCGCGGGGCACCGA | 4 |
| 8006 | CGACCCTGCGCGGGGCACCG | 3 |
| 8007 | GCGACCCTGCGCGGGGCACC | 2 |
| 8008 | CGCGACCCTGCGCGGGGCAC | 1 |
| 8009 | CGCGCACGCTCCTCCGCGTGCTCTCG | 101 |
| 8010 | GCGCACGCTCCTCCGCGTGC | 102 |
| 8011 | CGCACGCTCCTCCGCGTGCT | 103 |
| 8012 | GCACGCTCCTCCGCGTGCTC | 104 |
| 8013 | CACGCTCCTCCGCGTGCTCT | 105 |
| 8014 | ACGCTCCTCCGCGTGCTCTC | 106 |
| 8015 | CGCTCCTCCGCGTGCTCTCG | 107 |
| 8016 | GCTCCTCCGCGTGCTCTCGC | 108 |
| 8017 | CTCCTCCGCGTGCTCTCGCC | 109 |
| 8018 | TCCTCCGCGTGCTCTCGCCT | 110 |
| 8019 | CCTCCGCGTGCTCTCGCCTA | 111 |
| 8020 | CTCCGCGTGCTCTCGCCTAC | 112 |
| 8021 | TCCGCGTGCTCTCGCCTACC | 113 |
| 8022 | CCGCGTGCTCTCGCCTACCG | 114 |
| 8023 | CGCGTGCTCTCGCCTACCGC | 115 |
| 8024 | GCGTGCTCTCGCCTACCGCT | 116 |
| 8025 | CGTGCTCTCGCCTACCGCTG | 117 |
| 8026 | GTGCTCTCGCCTACCGCTGC | 118 |
| 8027 | TGCTCTCGCCTACCGCTGCC | 119 |
| 8028 | GCTCTCGCCTACCGCTGCCG | 120 |
| 8029 | CTCTCGCCTACCGCTGCCGA | 121 |
| 8030 | TCTCGCCTACCGCTGCCGAG | 122 |
| 8031 | CTCGCCTACCGCTGCCGAGG | 123 |
| 8032 | TCGCCTACCGCTGCCGAGGA | 124 |
| 8033 | CGCCTACCGCTGCCGAGGAA | 125 |
| 8034 | GCCTACCGCTGCCGAGGAAA | 126 |
| 8035 | CCTACCGCTGCCGAGGAAAC | 127 |
| 8036 | CTACCGCTGCCGAGGAAACT | 128 |
| 8037 | TACCGCTGCCGAGGAAACTG | 129 |
| 8038 | ACCGCTGCCGAGGAAACTGA | 130 |
| 8039 | CCGCTGCCGAGGAAACTGAC | 131 |
| 8040 | CGCTGCCGAGGAAACTGACG | 132 |
| 8041 | GCTGCCGAGGAAACTGACGG | 133 |
| 8042 | CTGCCGAGGAAACTGACGGA | 134 |
| 8043 | CCGCGCACGCTCCTCCGCGT | 100 |
| 8044 | CCCGCGCACGCTCCTCCGCG | 99 |
| 8045 | CCCCGCGCACGCTCCTCCGC | 98 |
| 8046 | CCCCCGCGCACGCTCCTCCG | 97 |
| 8047 | GCCCCCGCGCACGCTCCTCC | 96 |
| 8048 | GGCCCCCGCGCACGCTCCTC | 95 |
| 8049 | GGGCCCCCGCGCACGCTCCT | 94 |
| 8050 | GGGGCCCCCGCGCACGCTCC | 93 |
| 8051 | CGGGGCCCCCGCGCACGCTC | 92 |
| 8052 | CCGGGGCCCCCGCGCACGCT | 91 |
| 8053 | CCCGGGGCCCCCGCGCACGC | 90 |
| 8054 | TCCCGGGGCCCCCGCGCACG | 89 |
| 8055 | CTCCCGGGGCCCCCGCGCAC | 88 |
| 8056 | TCTCCCGGGGCCCCCGCGCA | 87 |
| 8057 | GTCTCCCGGGGCCCCCGCGC | 86 |
| 8058 | CGTCTCCCGGGGCCCCCGCG | 85 |
| 8059 | CCGTCTCCCGGGGCCCCCGC | 84 |
| 8060 | GCCGTCTCCCGGGGCCCCCG | 83 |
| 8061 | CGCCGTCTCCCGGGGCCCCC | 82 |
| 8062 | CCGCCGTCTCCCGGGGCCCC | 81 |
| 8063 | GCCGCCGTCTCCCGGGGCCC | 80 |
| 8064 | CGCCGCCGTCTCCCGGGGCC | 79 |
| 8065 | CCGCCGCCGTCTCCCGGGGC | 78 |
| 8066 | ACCGCCGCCGTCTCCCGGGG | 77 |
| 8067 | CACCGCCGCCGTCTCCCGGG | 76 |
| 8068 | CCACCGCCGCCGTCTCCCGG | 75 |
| 8069 | GCCACCGCCGCCGTCTCCCG | 74 |
| 8070 | CGCCACCGCCGCCGTCTCCC | 73 |
| 8071 | CCGCCACCGCCGCCGTCTCC | 72 |
| 8072 | GCCGCCACCGCCGCCGTCTC | 71 |
| 8073 | CGCCGCCACCGCCGCCGTCT | 70 |
| 8074 | GCGCCGCCACCGCCGCCGTC | 69 |
| 8075 | CGCGCCGCCACCGCCGCCGT | 68 |
| 8076 | CCGCGCCGCCACCGCCGCCG | 67 |
| 8077 | CCCGCGCCGCCACCGCCGCC | 66 |
| 8078 | GCCCGCGCCGCCACCGCCGC | 65 |
| 8079 | TGCCCGCGCCGCCACCGCCG | 64 |
| 8080 | CTGCCCGCGCCGCCACCGCC | 63 |
| 8081 | TCTGCCCGCGCCGCCACCGC | 62 |
| 8082 | CTCTGCCCGCGCCGCCACCG | 61 |
| 8083 | GCTCTGCCCGCGCCGCCACC | 60 |
| 8084 | TGCTCTGCCCGCGCCGCCAC | 59 |
| 8085 | TTGCTCTGCCCGCGCCGCCA | 58 |
| 8086 | CTTGCTCTGCCCGCGCCGCC | 57 |
| 8087 | CCTTGCTCTGCCCGCGCCGC | 56 |
| 8088 | TCCTTGCTCTGCCCGCGCCG | 55 |
| 8089 | GTCCTTGCTCTGCCCGCGCC | 54 |
| 8090 | CGTCCTTGCTCTGCCCGCGC | 53 |
| 8091 | GCGTCCTTGCTCTGCCCGCG | 52 |
| 8092 | CGCGTCCTTGCTCTGCCCGC | 51 |
| 8093 | CCGCGTCCTTGCTCTGCCCG | 50 |
| 8094 | GCCGCGTCCTTGCTCTGCCC | 49 |
| 8095 | CGCCGCGTCCTTGCTCTGCC | 48 |
| 8096 | CCGCCGCGTCCTTGCTCTGC | 47 |
| 8097 | TCCGCCGCGTCCTTGCTCTG | 46 |
| 8098 | ATCCGCCGCGTCCTTGCTCT | 45 |
| 8099 | GATCCGCCGCGTCCTTGCTC | 44 |
| 8100 | GGATCCGCCGCGTCCTTGCT | 43 |
| 8101 | GGGATCCGCCGCGTCCTTGC | 42 |
| 8102 | TGGGATCCGCCGCGTCCTTG | 41 |
| 8103 | GTGGGATCCGCCGCGTCCTT | 40 |
| 8104 | AGTGGGATCCGCCGCGTCCT | 39 |
| 8105 | GAGTGGGATCCGCCGCGTCC | 38 |
| 8106 | CGAGTGGGATCCGCCGCGTC | 37 |
| 8107 | GCGAGTGGGATCCGCCGCGT | 36 |
| 8108 | TGCGAGTGGGATCCGCCGCG | 35 |
| 8109 | GTGCGAGTGGGATCCGCCGC | 34 |
| 8110 | TGTGCGAGTGGGATCCGCCG | 33 |
| 8111 | CTGTGCGAGTGGGATCCGCC | 32 |
| 8112 | GCTGTGCGAGTGGGATCCGC | 31 |
| 8113 | TGCTGTGCGAGTGGGATCCG | 30 |
| 8114 | CTGCTGTGCGAGTGGGATCC | 29 |
| 8115 | GCTGCTGTGCGAGTGGGATC | 28 |
| 8116 | CGCTGCTGTGCGAGTGGGAT | 27 |
| 8117 | GCGCTGCTGTGCGAGTGGGA | 26 |
| 8118 | TGCGCTGCTGTGCGAGTGGG | 25 |
| 8119 | GTGCGCTGCTGTGCGAGTGG | 24 |
| 8120 | AGTGCGCTGCTGTGCGAGTG | 23 |
| 8121 | GAGTGCGCTGCTGTGCGAGT | 22 |
| 8122 | CGAGTGCGCTGCTGTGCGAG | 21 |
| 8123 | CCGAGTGCGCTGCTGTGCGA | 20 |
| 8124 | ACCGAGTGCGCTGCTGTGCG | 19 |
| 8125 | CACCGAGTGCGCTGCTGTGC | 18 |
| 8126 | GCACCGAGTGCGCTGCTGTG | 17 |
| 8127 | GGCACCGAGTGCGCTGCTGT | 16 |
| 8128 | GGGCACCGAGTGCGCTGCTG | 15 |
| 8129 | GGGGCACCGAGTGCGCTGCT | 14 |
| 8130 | CGGGGCACCGAGTGCGCTGC | 13 |
| 8131 | GCGGGGCACCGAGTGCGCTG | 12 |
| 8132 | CGCGGGGCACCGAGTGCGCT | 11 |
| 8133 | GCGCGGGGCACCGAGTGCGC | 10 |
| 8134 | TGCGCGGGGCACCGAGTGCG | 9 |
| 8135 | CTGCGCGGGGCACCGAGTGC | 8 |
| 8136 | CCTGCGCGGGGCACCGAGTG | 7 |
| 8137 | CCCTGCGCGGGGCACCGAGT | 6 |
| 8138 | ACCCTGCGCGGGGCACCGAG | 5 |
| 8139 | GACCCTGCGCGGGGCACCGA | 4 |
| 8140 | CGACCCTGCGCGGGGCACCG | 3 |
| 8141 | GCGACCCTGCGCGGGGCACC | 2 |
| 8142 | CGCGACCCTGCGCGGGGCAC | 1 |
| 8143 | CCGAGGAAACTGACGGAGCCCGAGCGCGG | 137 |
| 8144 | CGAGGAAACTGACGGAGCCC | 138 |
| 8145 | CGAGTCAGCTGATCCGGCCCACCCCG | 186 |
| 8146 | GAGTCAGCTGATCCGGCCCA | 187 |
| 8147 | AGTCAGCTGATCCGGCCCAC | 188 |
| 8148 | GTCAGCTGATCCGGCCCACC | 189 |
| 8149 | TCAGCTGATCCGGCCCACCC | 190 |
| 8150 | CAGCTGATCCGGCCCACCCC | 191 |
| 8151 | AGCTGATCCGGCCCACCCCG | 192 |
| 8152 | GCTGATCCGGCCCACCCCGC | 193 |
| 8153 | CTGATCCGGCCCACCCCGCT | 194 |
| 8154 | TGATCCGGCCCACCCCGCTC | 195 |
| 8155 | GATCCGGCCCACCCCGCTCG | 196 |
| 8156 | ATCCGGCCCACCCCGCTCGG | 197 |
| 8157 | TCCGGCCCACCCCGCTCGGC | 198 |
| 8158 | CCGGCCCACCCCGCTCGGCA | 199 |
| 8159 | CGGCCCACCCCGCTCGGCAC | 200 |
| 8160 | GGCCCACCCCGCTCGGCACC | 201 |
| 8161 | GCCCACCCCGCTCGGCACCC | 202 |
| 8162 | CCCACCCCGCTCGGCACCCG | 203 |
| 8163 | CCACCCCGCTCGGCACCCGA | 204 |
| 8164 | CACCCCGCTCGGCACCCGAG | 205 |
| 8165 | ACCCCGCTCGGCACCCGAGA | 206 |
| 8166 | CCCCGCTCGGCACCCGAGAG | 207 |
| 8167 | CCCGCTCGGCACCCGAGAGA | 208 |
| 8168 | CCGCTCGGCACCCGAGAGAG | 209 |
| 8169 | CGCTCGGCACCCGAGAGAGA | 210 |
| 8170 | GCTCGGCACCCGAGAGAGAC | 211 |
| 8171 | CTCGGCACCCGAGAGAGACC | 212 |
| 8172 | TCGGCACCCGAGAGAGACCC | 213 |
| 8173 | CGGCACCCGAGAGAGACCCC | 214 |
| 8174 | GGCACCCGAGAGAGACCCCT | 215 |
| 8175 | GCACCCGAGAGAGACCCCTA | 216 |
| 8176 | CACCCGAGAGAGACCCCTAG | 217 |
| 8177 | ACCCGAGAGAGACCCCTAGC | 218 |
| 8178 | CCCGAGAGAGACCCCTAGCG | 219 |
| 8179 | CCGAGAGAGACCCCTAGCGG | 220 |
| 8180 | CGAGAGAGACCCCTAGCGGC | 221 |
| 8181 | GAGAGAGACCCCTAGCGGCG | 222 |
| 8182 | AGAGAGACCCCTAGCGGCGC | 223 |
| 8183 | GAGAGACCCCTAGCGGCGCC | 224 |
| 8184 | AGAGACCCCTAGCGGCGCCG | 225 |
| 8185 | GAGACCCCTAGCGGCGCCGC | 226 |
| 8186 | AGACCCCTAGCGGCGCCGCC | 227 |
| 8187 | GACCCCTAGCGGCGCCGCCG | 228 |
| 8188 | ACCCCTAGCGGCGCCGCCGG | 229 |
| 8189 | CCCCTAGCGGCGCCGCCGGG | 230 |
| 8190 | CCCTAGCGGCGCCGCCGGGG | 231 |
| 8191 | CCTAGCGGCGCCGCCGGGGA | 232 |
| 8192 | CTAGCGGCGCCGCCGGGGAA | 233 |
| 8193 | TAGCGGCGCCGCCGGGGAAC | 234 |
| 8194 | AGCGGCGCCGCCGGGGAACT | 235 |
| 8195 | GCGGCGCCGCCGGGGAACTG | 236 |
| 8196 | CGGCGCCGCCGGGGAACTGC | 237 |
| 8197 | GGCGCCGCCGGGGAACTGCG | 238 |
| 8198 | GCGCCGCCGGGGAACTGCGC | 239 |
| 8199 | CGCCGCCGGGGAACTGCGCC | 240 |
| 8200 | GCCGCCGGGGAACTGCGCCC | 241 |
| 8201 | CCGCCGGGGAACTGCGCCCG | 242 |
| 8202 | CGCCGGGGAACTGCGCCCGC | 243 |
| 8203 | GCCGGGGAACTGCGCCCGCT | 244 |
| 8204 | CCGGGGAACTGCGCCCGCTC | 245 |
| 8205 | CGGGGAACTGCGCCCGCTCG | 246 |
| 8206 | GGGGAACTGCGCCCGCTCGC | 247 |
| 8207 | GGGAACTGCGCCCGCTCGCG | 248 |
| 8208 | GGAACTGCGCCCGCTCGCGC | 249 |
| 8209 | GAACTGCGCCCGCTCGCGCC | 250 |
| 8210 | AACTGCGCCCGCTCGCGCCG | 251 |
| 8211 | ACTGCGCCCGCTCGCGCCGG | 252 |
| 8212 | CTGCGCCCGCTCGCGCCGGG | 253 |
| 8213 | TGCGCCCGCTCGCGCCGGGA | 254 |
| 8214 | GCGCCCGCTCGCGCCGGGAG | 255 |
| 8215 | CGCCCGCTCGCGCCGGGAGG | 256 |
| 8216 | GCCCGCTCGCGCCGGGAGGG | 257 |
| 8217 | CCCGCTCGCGCCGGGAGGGG | 258 |
| 8218 | CCGCTCGCGCCGGGAGGGGC | 259 |
| 8219 | CGCTCGCGCCGGGAGGGGCC | 260 |
| 8220 | GCTCGCGCCGGGAGGGGCCC | 261 |
| 8221 | CTCGCGCCGGGAGGGGCCCT | 262 |
| 8222 | TCGCGCCGGGAGGGGCCCTC | 263 |
| 8223 | CGCGCCGGGAGGGGCCCTCG | 264 |
| 8224 | GCGCCGGGAGGGGCCCTCGC | 265 |
| 8225 | CGCCGGGAGGGGCCCTCGCG | 266 |
| 8226 | GCCGGGAGGGGCCCTCGCGC | 267 |
| 8227 | CCGGGAGGGGCCCTCGCGCC | 268 |
| 8228 | CGGGAGGGGCCCTCGCGCCC | 269 |
| 8229 | GGGAGGGGCCCTCGCGCCCC | 270 |
| 8230 | GGAGGGGCCCTCGCGCCCCG | 271 |
| 8231 | GAGGGGCCCTCGCGCCCCGC | 272 |
| 8232 | AGGGGCCCTCGCGCCCCGCG | 273 |
| 8233 | GGGGCCCTCGCGCCCCGCGC | 274 |
| 8234 | GGGCCCTCGCGCCCCGCGCC | 275 |
| 8235 | GGCCCTCGCGCCCCGCGCCC | 276 |
| 8236 | GCCCTCGCGCCCCGCGCCCA | 277 |
| 8237 | CCCTCGCGCCCCGCGCCCAC | 278 |
| 8238 | CCTCGCGCCCCGCGCCCACA | 279 |
| 8239 | CTCGCGCCCCGCGCCCACAG | 280 |
| 8240 | TCGCGCCCCGCGCCCACAGG | 281 |
| 8241 | CGCGCCCCGCGCCCACAGGT | 282 |
| 8242 | GCGCCCCGCGCCCACAGGTG | 283 |
| 8243 | CGCCCCGCGCCCACAGGTGC | 284 |
| 8244 | GCCCCGCGCCCACAGGTGCA | 285 |
| 8245 | CCCCGCGCCCACAGGTGCAC | 286 |
| 8246 | CCCGCGCCCACAGGTGCACG | 287 |
| 8247 | CCGCGCCCACAGGTGCACGC | 288 |
| 8248 | CGCGCCCACAGGTGCACGCG | 289 |
| 8249 | GCGCCCACAGGTGCACGCGC | 290 |
| 8250 | CGCCCACAGGTGCACGCGCC | 291 |
| 8251 | GCCCACAGGTGCACGCGCCC | 292 |
| 8252 | CCCACAGGTGCACGCGCCCT | 293 |
| 8253 | CCACAGGTGCACGCGCCCTT | 294 |
| 8254 | CACAGGTGCACGCGCCCTTG | 295 |
| 8255 | ACAGGTGCACGCGCCCTTGG | 296 |
| 8256 | CAGGTGCACGCGCCCTTGGC | 297 |
| 8257 | AGGTGCACGCGCCCTTGGCG | 298 |
| 8258 | GGTGCACGCGCCCTTGGCGC | 299 |
| 8259 | GTGCACGCGCCCTTGGCGCC | 300 |
| 8260 | TGCACGCGCCCTTGGCGCCG | 301 |
| 8261 | GCACGCGCCCTTGGCGCCGC | 302 |
| 8262 | CACGCGCCCTTGGCGCCGCC | 303 |
| 8263 | ACGCGCCCTTGGCGCCGCCT | 304 |
| 8264 | CGCGCCCTTGGCGCCGCCTG | 305 |
| 8265 | GCGCCCTTGGCGCCGCCTGC | 306 |
| 8266 | CGCCCTTGGCGCCGCCTGCA | 307 |
| 8267 | GCCCTTGGCGCCGCCTGCAC | 308 |
| 8268 | CCCTTGGCGCCGCCTGCACC | 309 |
| 8269 | CCTTGGCGCCGCCTGCACCC | 310 |
| 8270 | CTTGGCGCCGCCTGCACCCC | 311 |
| 8271 | TTGGCGCCGCCTGCACCCCA | 312 |
| 8272 | TGGCGCCGCCTGCACCCCAC | 313 |
| 8273 | GGCGCCGCCTGCACCCCACG | 314 |
| 8274 | GCGCCGCCTGCACCCCACGC | 315 |
| 8275 | CGCCGCCTGCACCCCACGCG | 316 |
| 8276 | GCCGCCTGCACCCCACGCGC | 317 |
| 8277 | CCGCCTGCACCCCACGCGCC | 318 |
| 8278 | CGCCTGCACCCCACGCGCCC | 319 |
| 8279 | GCCTGCACCCCACGCGCCCC | 320 |
| 8280 | CCTGCACCCCACGCGCCCCC | 321 |
| 8281 | CTGCACCCCACGCGCCCCCT | 322 |
| 8282 | TGCACCCCACGCGCCCCCTC | 323 |
| 8283 | GCACCCCACGCGCCCCCTCC | 324 |
| 8284 | CACCCCACGCGCCCCCTCCG | 325 |
| 8285 | ACCCCACGCGCCCCCTCCGC | 326 |
| 8286 | CCCCACGCGCCCCCTCCGCT | 327 |
| 8287 | CCCACGCGCCCCCTCCGCTC | 328 |
| 8288 | CCACGCGCCCCCTCCGCTCC | 329 |
| 8289 | CACGCGCCCCCTCCGCTCCC | 330 |
| 8290 | ACGCGCCCCCTCCGCTCCCC | 331 |
| 8291 | CGCGCCCCCTCCGCTCCCCG | 332 |
| 8292 | GCGCCCCCTCCGCTCCCCGG | 333 |
| 8293 | CGCCCCCTCCGCTCCCCGGC | 334 |
| 8294 | GCCCCCTCCGCTCCCCGGCC | 335 |
| 8295 | GCGAGTCAGCTGATCCGGCC | 185 |
| 8296 | GGCGAGTCAGCTGATCCGGC | 184 |
| 8297 | AGGCGAGTCAGCTGATCCGG | 183 |
| 8298 | CAGGCGAGTCAGCTGATCCG | 182 |
| 8299 | CCAGGCGAGTCAGCTGATCC | 181 |
| 8300 | GCCAGGCGAGTCAGCTGATC | 180 |
| 8301 | AGCCAGGCGAGTCAGCTGAT | 179 |
| 8302 | GAGCCAGGCGAGTCAGCTGA | 178 |
| 8303 | AGAGCCAGGCGAGTCAGCTG | 177 |
| 8304 | CAGAGCCAGGCGAGTCAGCT | 176 |
| 8305 | TCAGAGCCAGGCGAGTCAGC | 175 |
| 8306 | CTCAGAGCCAGGCGAGTCAG | 174 |
| 8307 | GCTCAGAGCCAGGCGAGTCA | 173 |
| 8308 | GGCTCAGAGCCAGGCGAGTC | 172 |
| 8309 | GGGCTCAGAGCCAGGCGAGT | 171 |
| 8310 | CGAGAGAGACCCCTAGCGGCGCCG | 221 |
| 8311 | GAGAGAGACCCCTAGCGGCG | 222 |
| 8312 | AGAGAGACCCCTAGCGGCGC | 223 |
| 8313 | GAGAGACCCCTAGCGGCGCC | 224 |
| 8314 | AGAGACCCCTAGCGGCGCCG | 225 |
| 8315 | GAGACCCCTAGCGGCGCCGC | 226 |
| 8316 | AGACCCCTAGCGGCGCCGCC | 227 |
| 8317 | GACCCCTAGCGGCGCCGCCG | 228 |
| 8318 | ACCCCTAGCGGCGCCGCCGG | 229 |
| 8319 | CCCCTAGCGGCGCCGCCGGG | 230 |
| 8320 | CCCTAGCGGCGCCGCCGGGG | 231 |
| 8321 | CCTAGCGGCGCCGCCGGGGA | 232 |
| 8322 | CTAGCGGCGCCGCCGGGGAA | 233 |
| 8323 | TAGCGGCGCCGCCGGGGAAC | 234 |
| 8324 | AGCGGCGCCGCCGGGGAACT | 235 |
| 8325 | GCGGCGCCGCCGGGGAACTG | 236 |
| 8326 | CGGCGCCGCCGGGGAACTGC | 237 |
| 8327 | GGCGCCGCCGGGGAACTGCG | 238 |
| 8328 | GCGCCGCCGGGGAACTGCGC | 239 |
| 8329 | CGCCGCCGGGGAACTGCGCC | 240 |
| 8330 | GCCGCCGGGGAACTGCGCCC | 241 |
| 8331 | CCGCCGGGGAACTGCGCCCG | 242 |
| 8332 | CGCCGGGGAACTGCGCCCGC | 243 |
| 8333 | GCCGGGGAACTGCGCCCGCT | 244 |
| 8334 | CCGGGGAACTGCGCCCGCTC | 245 |
| 8335 | CGGGGAACTGCGCCCGCTCG | 246 |
| 8336 | GGGGAACTGCGCCCGCTCGC | 247 |
| 8337 | GGGAACTGCGCCCGCTCGCG | 248 |
| 8338 | GGAACTGCGCCCGCTCGCGC | 249 |
| 8339 | GAACTGCGCCCGCTCGCGCC | 250 |
| 8340 | AACTGCGCCCGCTCGCGCCG | 251 |
| 8341 | ACTGCGCCCGCTCGCGCCGG | 252 |
| 8342 | CTGCGCCCGCTCGCGCCGGG | 253 |
| 8343 | TGCGCCCGCTCGCGCCGGGA | 254 |
| 8344 | GCGCCCGCTCGCGCCGGGAG | 255 |
| 8345 | CGCCCGCTCGCGCCGGGAGG | 256 |
| 8346 | GCCCGCTCGCGCCGGGAGGG | 257 |
| 8347 | CCCGCTCGCGCCGGGAGGGG | 258 |
| 8348 | CCGCTCGCGCCGGGAGGGGC | 259 |
| 8349 | CGCTCGCGCCGGGAGGGGCC | 260 |
| 8350 | GCTCGCGCCGGGAGGGGCCC | 261 |
| 8351 | CTCGCGCCGGGAGGGGCCCT | 262 |
| 8352 | TCGCGCCGGGAGGGGCCCTC | 263 |
| 8353 | CGCGCCGGGAGGGGCCCTCG | 264 |
| 8354 | GCGCCGGGAGGGGCCCTCGC | 265 |
| 8355 | CGCCGGGAGGGGCCCTCGCG | 266 |
| 8356 | GCCGGGAGGGGCCCTCGCGC | 267 |
| 8357 | CCGGGAGGGGCCCTCGCGCC | 268 |
| 8358 | CGGGAGGGGCCCTCGCGCCC | 269 |
| 8359 | GGGAGGGGCCCTCGCGCCCC | 270 |
| 8360 | GGAGGGGCCCTCGCGCCCCG | 271 |
| 8361 | GAGGGGCCCTCGCGCCCCGC | 272 |
| 8362 | AGGGGCCCTCGCGCCCCGCG | 273 |
| 8363 | GGGGCCCTCGCGCCCCGCGC | 274 |
| 8364 | GGGCCCTCGCGCCCCGCGCC | 275 |
| 8365 | GGCCCTCGCGCCCCGCGCCC | 276 |
| 8366 | GCCCTCGCGCCCCGCGCCCA | 277 |
| 8367 | CCCTCGCGCCCCGCGCCCAC | 278 |
| 8368 | CCTCGCGCCCCGCGCCCACA | 279 |
| 8369 | CTCGCGCCCCGCGCCCACAG | 280 |
| 8370 | TCGCGCCCCGCGCCCACAGG | 281 |
| 8371 | CGCGCCCCGCGCCCACAGGT | 282 |
| 8372 | GCGCCCCGCGCCCACAGGTG | 283 |
| 8373 | CGCCCCGCGCCCACAGGTGC | 284 |
| 8374 | GCCCCGCGCCCACAGGTGCA | 285 |
| 8375 | CCCCGCGCCCACAGGTGCAC | 286 |
| 8376 | CCCGCGCCCACAGGTGCACG | 287 |
| 8377 | CCGCGCCCACAGGTGCACGC | 288 |
| 8378 | CGCGCCCACAGGTGCACGCG | 289 |
| 8379 | GCGCCCACAGGTGCACGCGC | 290 |
| 8380 | CGCCCACAGGTGCACGCGCC | 291 |
| 8381 | GCCCACAGGTGCACGCGCCC | 292 |
| 8382 | CCCACAGGTGCACGCGCCCT | 293 |
| 8383 | CCACAGGTGCACGCGCCCTT | 294 |
| 8384 | CACAGGTGCACGCGCCCTTG | 295 |
| 8385 | ACAGGTGCACGCGCCCTTGG | 296 |
| 8386 | CAGGTGCACGCGCCCTTGGC | 297 |
| 8387 | AGGTGCACGCGCCCTTGGCG | 298 |
| 8388 | GGTGCACGCGCCCTTGGCGC | 299 |
| 8389 | GTGCACGCGCCCTTGGCGCC | 300 |
| 8390 | TGCACGCGCCCTTGGCGCCG | 301 |
| 8391 | GCACGCGCCCTTGGCGCCGC | 302 |
| 8392 | CACGCGCCCTTGGCGCCGCC | 303 |
| 8393 | ACGCGCCCTTGGCGCCGCCT | 304 |
| 8394 | CGCGCCCTTGGCGCCGCCTG | 305 |
| 8395 | GCGCCCTTGGCGCCGCCTGC | 306 |
| 8396 | CGCCCTTGGCGCCGCCTGCA | 307 |
| 8397 | GCCCTTGGCGCCGCCTGCAC | 308 |
| 8398 | CCCTTGGCGCCGCCTGCACC | 309 |
| 8399 | CCTTGGCGCCGCCTGCACCC | 310 |
| 8400 | CTTGGCGCCGCCTGCACCCC | 311 |
| 8401 | TTGGCGCCGCCTGCACCCCA | 312 |
| 8402 | TGGCGCCGCCTGCACCCCAC | 313 |
| 8403 | GGCGCCGCCTGCACCCCACG | 314 |
| 8404 | GCGCCGCCTGCACCCCACGC | 315 |
| 8405 | CGCCGCCTGCACCCCACGCG | 316 |
| 8406 | GCCGCCTGCACCCCACGCGC | 317 |
| 8407 | CCGCCTGCACCCCACGCGCC | 318 |
| 8408 | CGCCTGCACCCCACGCGCCC | 319 |
| 8409 | GCCTGCACCCCACGCGCCCC | 320 |
| 8410 | CCTGCACCCCACGCGCCCCC | 321 |
| 8411 | CTGCACCCCACGCGCCCCCT | 322 |
| 8412 | TGCACCCCACGCGCCCCCTC | 323 |
| 8413 | GCACCCCACGCGCCCCCTCC | 324 |
| 8414 | CACCCCACGCGCCCCCTCCG | 325 |
| 8415 | ACCCCACGCGCCCCCTCCGC | 326 |
| 8416 | CCCCACGCGCCCCCTCCGCT | 327 |
| 8417 | CCCACGCGCCCCCTCCGCTC | 328 |
| 8418 | CCACGCGCCCCCTCCGCTCC | 329 |
| 8419 | CACGCGCCCCCTCCGCTCCC | 330 |
| 8420 | ACGCGCCCCCTCCGCTCCCC | 331 |
| 8421 | CGCGCCCCCTCCGCTCCCCG | 332 |
| 8422 | GCGCCCCCTCCGCTCCCCGG | 333 |
| 8423 | CGCCCCCTCCGCTCCCCGGC | 334 |
| 8424 | GCCCCCTCCGCTCCCCGGCC | 335 |
| 8425 | CCGAGAGAGACCCCTAGCGG | 220 |
| 8426 | CCCGAGAGAGACCCCTAGCG | 219 |
| 8427 | ACCCGAGAGAGACCCCTAGC | 218 |
| 8428 | CACCCGAGAGAGACCCCTAG | 217 |
| 8429 | GCACCCGAGAGAGACCCCTA | 216 |
| 8430 | GGCACCCGAGAGAGACCCCT | 215 |
| 8431 | CGGCACCCGAGAGAGACCCC | 214 |
| 8432 | TCGGCACCCGAGAGAGACCC | 213 |
| 8433 | CTCGGCACCCGAGAGAGACC | 212 |
| 8434 | GCTCGGCACCCGAGAGAGAC | 211 |
| 8435 | CGCTCGGCACCCGAGAGAGA | 210 |
| 8436 | CCGCTCGGCACCCGAGAGAG | 209 |
| 8437 | CCCGCTCGGCACCCGAGAGA | 208 |
| 8438 | CCCCGCTCGGCACCCGAGAG | 207 |
| 8439 | ACCCCGCTCGGCACCCGAGA | 206 |
| 8440 | CACCCCGCTCGGCACCCGAG | 205 |
| 8441 | CCACCCCGCTCGGCACCCGA | 204 |
| 8442 | CCCACCCCGCTCGGCACCCG | 203 |
| 8443 | GCCCACCCCGCTCGGCACCC | 202 |
| 8444 | GGCCCACCCCGCTCGGCACC | 201 |
| 8445 | CGGCCCACCCCGCTCGGCAC | 200 |
| 8446 | CCGGCCCACCCCGCTCGGCA | 199 |
| 8447 | TCCGGCCCACCCCGCTCGGC | 198 |
| 8448 | ATCCGGCCCACCCCGCTCGG | 197 |
| 8449 | GATCCGGCCCACCCCGCTCG | 196 |
| 8450 | TGATCCGGCCCACCCCGCTC | 195 |
| 8451 | CTGATCCGGCCCACCCCGCT | 194 |
| 8452 | GCTGATCCGGCCCACCCCGC | 193 |
| 8453 | AGCTGATCCGGCCCACCCCG | 192 |
| 8454 | CAGCTGATCCGGCCCACCCC | 191 |
| 8455 | TCAGCTGATCCGGCCCACCC | 190 |
| 8456 | GTCAGCTGATCCGGCCCACC | 189 |
| 8457 | AGTCAGCTGATCCGGCCCAC | 188 |
| 8458 | GAGTCAGCTGATCCGGCCCA | 187 |
| 8459 | CGAGTCAGCTGATCCGGCCC | 186 |
| 8460 | GCGAGTCAGCTGATCCGGCC | 185 |
| 8461 | GGCGAGTCAGCTGATCCGGC | 184 |
| 8462 | AGGCGAGTCAGCTGATCCGG | 183 |
| 8463 | CAGGCGAGTCAGCTGATCCG | 182 |
| 8464 | CCAGGCGAGTCAGCTGATCC | 181 |
| 8465 | GCCAGGCGAGTCAGCTGATC | 180 |
| 8466 | AGCCAGGCGAGTCAGCTGAT | 179 |
| 8467 | GAGCCAGGCGAGTCAGCTGA | 178 |
| 8468 | AGAGCCAGGCGAGTCAGCTG | 177 |
| 8469 | CAGAGCCAGGCGAGTCAGCT | 176 |
| 8470 | TCAGAGCCAGGCGAGTCAGC | 175 |
| 8471 | CTCAGAGCCAGGCGAGTCAG | 174 |
| 8472 | GCTCAGAGCCAGGCGAGTCA | 173 |
| 8473 | GGCTCAGAGCCAGGCGAGTC | 172 |
| 8474 | GGGCTCAGAGCCAGGCGAGT | 171 |
| 8475 | CGCCCGCTCGCGCCGGGAGGGGCCCTCG | 256 |
| 8476 | GCCCGCTCGCGCCGGGAGGG | 257 |
| 8477 | CCCGCTCGCGCCGGGAGGGG | 258 |
| 8478 | CCGCTCGCGCCGGGAGGGGC | 259 |
| 8479 | CGCTCGCGCCGGGAGGGGCC | 260 |
| 8480 | GCTCGCGCCGGGAGGGGCCC | 261 |
| 8481 | CTCGCGCCGGGAGGGGCCCT | 262 |
| 8482 | TCGCGCCGGGAGGGGCCCTC | 263 |
| 8483 | CGCGCCGGGAGGGGCCCTCG | 264 |
| 8484 | GCGCCGGGAGGGGCCCTCGC | 265 |
| 8485 | CGCCGGGAGGGGCCCTCGCG | 266 |
| 8486 | GCCGGGAGGGGCCCTCGCGC | 267 |
| 8487 | CCGGGAGGGGCCCTCGCGCC | 268 |
| 8488 | CGGGAGGGGCCCTCGCGCCC | 269 |
| 8489 | GGGAGGGGCCCTCGCGCCCC | 270 |
| 8490 | GGAGGGGCCCTCGCGCCCCG | 271 |
| 8491 | GAGGGGCCCTCGCGCCCCGC | 272 |
| 8492 | AGGGGCCCTCGCGCCCCGCG | 273 |
| 8493 | GGGGCCCTCGCGCCCCGCGC | 274 |
| 8494 | GGGCCCTCGCGCCCCGCGCC | 275 |
| 8495 | GGCCCTCGCGCCCCGCGCCC | 276 |
| 8496 | GCCCTCGCGCCCCGCGCCCA | 277 |
| 8497 | CCCTCGCGCCCCGCGCCCAC | 278 |
| 8498 | CCTCGCGCCCCGCGCCCACA | 279 |
| 8499 | CTCGCGCCCCGCGCCCACAG | 280 |
| 8500 | TCGCGCCCCGCGCCCACAGG | 281 |
| 8501 | CGCGCCCCGCGCCCACAGGT | 282 |
| 8502 | GCGCCCCGCGCCCACAGGTG | 283 |
| 8503 | CGCCCCGCGCCCACAGGTGC | 284 |
| 8504 | GCCCCGCGCCCACAGGTGCA | 285 |
| 8505 | CCCCGCGCCCACAGGTGCAC | 286 |
| 8506 | CCCGCGCCCACAGGTGCACG | 287 |
| 8507 | CCGCGCCCACAGGTGCACGC | 288 |
| 8508 | CGCGCCCACAGGTGCACGCG | 289 |
| 8509 | GCGCCCACAGGTGCACGCGC | 290 |
| 8510 | CGCCCACAGGTGCACGCGCC | 291 |
| 8511 | GCCCACAGGTGCACGCGCCC | 292 |
| 8512 | CCCACAGGTGCACGCGCCCT | 293 |
| 8513 | CCACAGGTGCACGCGCCCTT | 294 |
| 8514 | CACAGGTGCACGCGCCCTTG | 295 |
| 8515 | ACAGGTGCACGCGCCCTTGG | 296 |
| 8516 | CAGGTGCACGCGCCCTTGGC | 297 |
| 8517 | AGGTGCACGCGCCCTTGGCG | 298 |
| 8518 | GGTGCACGCGCCCTTGGCGC | 299 |
| 8519 | GTGCACGCGCCCTTGGCGCC | 300 |
| 8520 | TGCACGCGCCCTTGGCGCCG | 301 |
| 8521 | GCACGCGCCCTTGGCGCCGC | 302 |
| 8522 | CACGCGCCCTTGGCGCCGCC | 303 |
| 8523 | ACGCGCCCTTGGCGCCGCCT | 304 |
| 8524 | CGCGCCCTTGGCGCCGCCTG | 305 |
| 8525 | GCGCCCTTGGCGCCGCCTGC | 306 |
| 8526 | CGCCCTTGGCGCCGCCTGCA | 307 |
| 8527 | GCCCTTGGCGCCGCCTGCAC | 308 |
| 8528 | CCCTTGGCGCCGCCTGCACC | 309 |
| 8529 | CCTTGGCGCCGCCTGCACCC | 310 |
| 8530 | CTTGGCGCCGCCTGCACCCC | 311 |
| 8531 | TTGGCGCCGCCTGCACCCCA | 312 |
| 8532 | TGGCGCCGCCTGCACCCCAC | 313 |
| 8533 | GGCGCCGCCTGCACCCCACG | 314 |
| 8534 | GCGCCGCCTGCACCCCACGC | 315 |
| 8535 | CGCCGCCTGCACCCCACGCG | 316 |
| 8536 | GCCGCCTGCACCCCACGCGC | 317 |
| 8537 | CCGCCTGCACCCCACGCGCC | 318 |
| 8538 | CGCCTGCACCCCACGCGCCC | 319 |
| 8539 | GCCTGCACCCCACGCGCCCC | 320 |
| 8540 | CCTGCACCCCACGCGCCCCC | 321 |
| 8541 | CTGCACCCCACGCGCCCCCT | 322 |
| 8542 | TGCACCCCACGCGCCCCCTC | 323 |
| 8543 | GCACCCCACGCGCCCCCTCC | 324 |
| 8544 | CACCCCACGCGCCCCCTCCG | 325 |
| 8545 | ACCCCACGCGCCCCCTCCGC | 326 |
| 8546 | CCCCACGCGCCCCCTCCGCT | 327 |
| 8547 | CCCACGCGCCCCCTCCGCTC | 328 |
| 8548 | CCACGCGCCCCCTCCGCTCC | 329 |
| 8549 | CACGCGCCCCCTCCGCTCCC | 330 |
| 8550 | ACGCGCCCCCTCCGCTCCCC | 331 |
| 8551 | CGCGCCCCCTCCGCTCCCCG | 332 |
| 8552 | GCGCCCCCTCCGCTCCCCGG | 333 |
| 8553 | CGCCCCCTCCGCTCCCCGGC | 334 |
| 8554 | GCCCCCTCCGCTCCCCGGCC | 335 |
| 8555 | GCGCCCGCTCGCGCCGGGAG | 255 |
| 8556 | TGCGCCCGCTCGCGCCGGGA | 254 |
| 8557 | CTGCGCCCGCTCGCGCCGGG | 253 |
| 8558 | ACTGCGCCCGCTCGCGCCGG | 252 |
| 8559 | AACTGCGCCCGCTCGCGCCG | 251 |
| 8560 | GAACTGCGCCCGCTCGCGCC | 250 |
| 8561 | GGAACTGCGCCCGCTCGCGC | 249 |
| 8562 | GGGAACTGCGCCCGCTCGCG | 248 |
| 8563 | GGGGAACTGCGCCCGCTCGC | 247 |
| 8564 | CGGGGAACTGCGCCCGCTCG | 246 |
| 8565 | CCGGGGAACTGCGCCCGCTC | 245 |
| 8566 | GCCGGGGAACTGCGCCCGCT | 244 |
| 8567 | CGCCGGGGAACTGCGCCCGC | 243 |
| 8568 | CCGCCGGGGAACTGCGCCCG | 242 |
| 8569 | GCCGCCGGGGAACTGCGCCC | 241 |
| 8570 | CGCCGCCGGGGAACTGCGCC | 240 |
| 8571 | GCGCCGCCGGGGAACTGCGC | 239 |
| 8572 | GGCGCCGCCGGGGAACTGCG | 238 |
| 8573 | CGGCGCCGCCGGGGAACTGC | 237 |
| 8574 | GCGGCGCCGCCGGGGAACTG | 236 |
| 8575 | AGCGGCGCCGCCGGGGAACT | 235 |
| 8576 | TAGCGGCGCCGCCGGGGAAC | 234 |
| 8577 | CTAGCGGCGCCGCCGGGGAA | 233 |
| 8578 | CCTAGCGGCGCCGCCGGGGA | 232 |
| 8579 | CCCTAGCGGCGCCGCCGGGG | 231 |
| 8580 | CCCCTAGCGGCGCCGCCGGG | 230 |
| 8581 | ACCCCTAGCGGCGCCGCCGG | 229 |
| 8582 | GACCCCTAGCGGCGCCGCCG | 228 |
| 8583 | AGACCCCTAGCGGCGCCGCC | 227 |
| 8584 | GAGACCCCTAGCGGCGCCGC | 226 |
| 8585 | AGAGACCCCTAGCGGCGCCG | 225 |
| 8586 | GAGAGACCCCTAGCGGCGCC | 224 |
| 8587 | AGAGAGACCCCTAGCGGCGC | 223 |
| 8588 | GAGAGAGACCCCTAGCGGCG | 222 |
| 8589 | CGAGAGAGACCCCTAGCGGC | 221 |
| 8590 | CCGAGAGAGACCCCTAGCGG | 220 |
| 8591 | CCCGAGAGAGACCCCTAGCG | 219 |
| 8592 | ACCCGAGAGAGACCCCTAGC | 218 |
| 8593 | CACCCGAGAGAGACCCCTAG | 217 |
| 8594 | GCACCCGAGAGAGACCCCTA | 216 |
| 8595 | GGCACCCGAGAGAGACCCCT | 215 |
| 8596 | CGGCACCCGAGAGAGACCCC | 214 |
| 8597 | TCGGCACCCGAGAGAGACCC | 213 |
| 8598 | CTCGGCACCCGAGAGAGACC | 212 |
| 8599 | GCTCGGCACCCGAGAGAGAC | 211 |
| 8600 | CGCTCGGCACCCGAGAGAGA | 210 |
| 8601 | CCGCTCGGCACCCGAGAGAG | 209 |
| 8602 | CCCGCTCGGCACCCGAGAGA | 208 |
| 8603 | CCCCGCTCGGCACCCGAGAG | 207 |
| 8604 | ACCCCGCTCGGCACCCGAGA | 206 |
| 8605 | CACCCCGCTCGGCACCCGAG | 205 |
| 8606 | CCACCCCGCTCGGCACCCGA | 204 |
| 8607 | CCCACCCCGCTCGGCACCCG | 203 |
| 8608 | GCCCACCCCGCTCGGCACCC | 202 |
| 8609 | GGCCCACCCCGCTCGGCACC | 201 |
| 8610 | CGGCCCACCCCGCTCGGCAC | 200 |
| 8611 | CCGGCCCACCCCGCTCGGCA | 199 |
| 8612 | TCCGGCCCACCCCGCTCGGC | 198 |
| 8613 | ATCCGGCCCACCCCGCTCGG | 197 |
| 8614 | GATCCGGCCCACCCCGCTCG | 196 |
| 8615 | TGATCCGGCCCACCCCGCTC | 195 |
| 8616 | CTGATCCGGCCCACCCCGCT | 194 |
| 8617 | GCTGATCCGGCCCACCCCGC | 193 |
| 8618 | AGCTGATCCGGCCCACCCCG | 192 |
| 8619 | CAGCTGATCCGGCCCACCCC | 191 |
| 8620 | TCAGCTGATCCGGCCCACCC | 190 |
| 8621 | GTCAGCTGATCCGGCCCACC | 189 |
| 8622 | AGTCAGCTGATCCGGCCCAC | 188 |
| 8623 | GAGTCAGCTGATCCGGCCCA | 187 |
| 8624 | CGAGTCAGCTGATCCGGCCC | 186 |
| 8625 | GCGAGTCAGCTGATCCGGCC | 185 |
| 8626 | GGCGAGTCAGCTGATCCGGC | 184 |
| 8627 | AGGCGAGTCAGCTGATCCGG | 183 |
| 8628 | CAGGCGAGTCAGCTGATCCG | 182 |
| 8629 | CCAGGCGAGTCAGCTGATCC | 181 |
| 8630 | GCCAGGCGAGTCAGCTGATC | 180 |
| 8631 | AGCCAGGCGAGTCAGCTGAT | 179 |
| 8632 | GAGCCAGGCGAGTCAGCTGA | 178 |
| 8633 | AGAGCCAGGCGAGTCAGCTG | 177 |
| 8634 | CAGAGCCAGGCGAGTCAGCT | 176 |
| 8635 | TCAGAGCCAGGCGAGTCAGC | 175 |
| 8636 | CTCAGAGCCAGGCGAGTCAG | 174 |
| 8637 | GCTCAGAGCCAGGCGAGTCA | 173 |
| 8638 | GGCTCAGAGCCAGGCGAGTC | 172 |
| 8639 | GGGCTCAGAGCCAGGCGAGT | 171 |
| 8640 | CGCGCCCACAGGTGCACGCGCCCTTGGCG | 289 |
| 8641 | GCGCCCACAGGTGCACGCGC | 290 |
| 8642 | CGCCCACAGGTGCACGCGCC | 291 |
| 8643 | GCCCACAGGTGCACGCGCCC | 292 |
| 8644 | CCCACAGGTGCACGCGCCCT | 293 |
| 8645 | CCACAGGTGCACGCGCCCTT | 294 |
| 8646 | CACAGGTGCACGCGCCCTTG | 295 |
| 8647 | ACAGGTGCACGCGCCCTTGG | 296 |
| 8648 | CAGGTGCACGCGCCCTTGGC | 297 |
| 8649 | AGGTGCACGCGCCCTTGGCG | 298 |
| 8650 | GGTGCACGCGCCCTTGGCGC | 299 |
| 8651 | GTGCACGCGCCCTTGGCGCC | 300 |
| 8652 | TGCACGCGCCCTTGGCGCCG | 301 |
| 8653 | GCACGCGCCCTTGGCGCCGC | 302 |
| 8654 | CACGCGCCCTTGGCGCCGCC | 303 |
| 8655 | ACGCGCCCTTGGCGCCGCCT | 304 |
| 8656 | CGCGCCCTTGGCGCCGCCTG | 305 |
| 8657 | GCGCCCTTGGCGCCGCCTGC | 306 |
| 8658 | CGCCCTTGGCGCCGCCTGCA | 307 |
| 8659 | GCCCTTGGCGCCGCCTGCAC | 308 |
| 8660 | CCCTTGGCGCCGCCTGCACC | 309 |
| 8661 | CCTTGGCGCCGCCTGCACCC | 310 |
| 8662 | CTTGGCGCCGCCTGCACCCC | 311 |
| 8663 | TTGGCGCCGCCTGCACCCCA | 312 |
| 8664 | TGGCGCCGCCTGCACCCCAC | 313 |
| 8665 | GGCGCCGCCTGCACCCCACG | 314 |
| 8666 | GCGCCGCCTGCACCCCACGC | 315 |
| 8667 | CGCCGCCTGCACCCCACGCG | 316 |
| 8668 | GCCGCCTGCACCCCACGCGC | 317 |
| 8669 | CCGCCTGCACCCCACGCGCC | 318 |
| 8670 | CGCCTGCACCCCACGCGCCC | 319 |
| 8671 | GCCTGCACCCCACGCGCCCC | 320 |
| 8672 | CCTGCACCCCACGCGCCCCC | 321 |
| 8673 | CTGCACCCCACGCGCCCCCT | 322 |
| 8674 | TGCACCCCACGCGCCCCCTC | 323 |
| 8675 | GCACCCCACGCGCCCCCTCC | 324 |
| 8676 | CACCCCACGCGCCCCCTCCG | 325 |
| 8677 | ACCCCACGCGCCCCCTCCGC | 326 |
| 8678 | CCCCACGCGCCCCCTCCGCT | 327 |
| 8679 | CCCACGCGCCCCCTCCGCTC | 328 |
| 8680 | CCACGCGCCCCCTCCGCTCC | 329 |
| 8681 | CACGCGCCCCCTCCGCTCCC | 330 |
| 8682 | ACGCGCCCCCTCCGCTCCCC | 331 |
| 8683 | CGCGCCCCCTCCGCTCCCCG | 332 |
| 8684 | GCGCCCCCTCCGCTCCCCGG | 333 |
| 8685 | CGCCCCCTCCGCTCCCCGGC | 334 |
| 8686 | GCCCCCTCCGCTCCCCGGCC | 335 |
| 8687 | CCGCGCCCACAGGTGCACGC | 288 |
| 8688 | CCCGCGCCCACAGGTGCACG | 287 |
| 8689 | CCCCGCGCCCACAGGTGCAC | 286 |
| 8690 | GCCCCGCGCCCACAGGTGCA | 285 |
| 8691 | CGCCCCGCGCCCACAGGTGC | 284 |
| 8692 | GCGCCCCGCGCCCACAGGTG | 283 |
| 8693 | CGCGCCCCGCGCCCACAGGT | 282 |
| 8694 | TCGCGCCCCGCGCCCACAGG | 281 |
| 8695 | CTCGCGCCCCGCGCCCACAG | 280 |
| 8696 | CCTCGCGCCCCGCGCCCACA | 279 |
| 8697 | CCCTCGCGCCCCGCGCCCAC | 278 |
| 8698 | GCCCTCGCGCCCCGCGCCCA | 277 |
| 8699 | GGCCCTCGCGCCCCGCGCCC | 276 |
| 8700 | GGGCCCTCGCGCCCCGCGCC | 275 |
| 8701 | GGGGCCCTCGCGCCCCGCGC | 274 |
| 8702 | AGGGGCCCTCGCGCCCCGCG | 273 |
| 8703 | GAGGGGCCCTCGCGCCCCGC | 272 |
| 8704 | GGAGGGGCCCTCGCGCCCCG | 271 |
| 8705 | GGGAGGGGCCCTCGCGCCCC | 270 |
| 8706 | CGGGAGGGGCCCTCGCGCCC | 269 |
| 8707 | CCGGGAGGGGCCCTCGCGCC | 268 |
| 8708 | GCCGGGAGGGGCCCTCGCGC | 267 |
| 8709 | CGCCGGGAGGGGCCCTCGCG | 266 |
| 8710 | GCGCCGGGAGGGGCCCTCGC | 265 |
| 8711 | CGCGCCGGGAGGGGCCCTCG | 264 |
| 8712 | TCGCGCCGGGAGGGGCCCTC | 263 |
| 8713 | CTCGCGCCGGGAGGGGCCCT | 262 |
| 8714 | GCTCGCGCCGGGAGGGGCCC | 261 |
| 8715 | CGCTCGCGCCGGGAGGGGCC | 260 |
| 8716 | CCGCTCGCGCCGGGAGGGGC | 259 |
| 8717 | CCCGCTCGCGCCGGGAGGGG | 258 |
| 8718 | GCCCGCTCGCGCCGGGAGGG | 257 |
| 8719 | CGCCCGCTCGCGCCGGGAGG | 256 |
| 8720 | GCGCCCGCTCGCGCCGGGAG | 255 |
| 8721 | TGCGCCCGCTCGCGCCGGGA | 254 |
| 8722 | CTGCGCCCGCTCGCGCCGGG | 253 |
| 8723 | ACTGCGCCCGCTCGCGCCGG | 252 |
| 8724 | AACTGCGCCCGCTCGCGCCG | 251 |
| 8725 | GAACTGCGCCCGCTCGCGCC | 250 |
| 8726 | GGAACTGCGCCCGCTCGCGC | 249 |
| 8727 | GGGAACTGCGCCCGCTCGCG | 248 |
| 8728 | GGGGAACTGCGCCCGCTCGC | 247 |
| 8729 | CGGGGAACTGCGCCCGCTCG | 246 |
| 8730 | CCGGGGAACTGCGCCCGCTC | 245 |
| 8731 | GCCGGGGAACTGCGCCCGCT | 244 |
| 8732 | CGCCGGGGAACTGCGCCCGC | 243 |
| 8733 | CCGCCGGGGAACTGCGCCCG | 242 |
| 8734 | GCCGCCGGGGAACTGCGCCC | 241 |
| 8735 | CGCCGCCGGGGAACTGCGCC | 240 |
| 8736 | GCGCCGCCGGGGAACTGCGC | 239 |
| 8737 | GGCGCCGCCGGGGAACTGCG | 238 |
| 8738 | CGGCGCCGCCGGGGAACTGC | 237 |
| 8739 | GCGGCGCCGCCGGGGAACTG | 236 |
| 8740 | AGCGGCGCCGCCGGGGAACT | 235 |
| 8741 | TAGCGGCGCCGCCGGGGAAC | 234 |
| 8742 | CTAGCGGCGCCGCCGGGGAA | 233 |
| 8743 | CCTAGCGGCGCCGCCGGGGA | 232 |
| 8744 | CCCTAGCGGCGCCGCCGGGG | 231 |
| 8745 | CCCCTAGCGGCGCCGCCGGG | 230 |
| 8746 | ACCCCTAGCGGCGCCGCCGG | 229 |
| 8747 | GACCCCTAGCGGCGCCGCCG | 228 |
| 8748 | AGACCCCTAGCGGCGCCGCC | 227 |
| 8749 | GAGACCCCTAGCGGCGCCGC | 226 |
| 8750 | AGAGACCCCTAGCGGCGCCG | 225 |
| 8751 | GAGAGACCCCTAGCGGCGCC | 224 |
| 8752 | AGAGAGACCCCTAGCGGCGC | 223 |
| 8753 | GAGAGAGACCCCTAGCGGCG | 222 |
| 8754 | CGAGAGAGACCCCTAGCGGC | 221 |
| 8755 | CCGAGAGAGACCCCTAGCGG | 220 |
| 8756 | CCCGAGAGAGACCCCTAGCG | 219 |
| 8757 | ACCCGAGAGAGACCCCTAGC | 218 |
| 8758 | CACCCGAGAGAGACCCCTAG | 217 |
| 8759 | GCACCCGAGAGAGACCCCTA | 216 |
| 8760 | GGCACCCGAGAGAGACCCCT | 215 |
| 8761 | CGGCACCCGAGAGAGACCCC | 214 |
| 8762 | TCGGCACCCGAGAGAGACCC | 213 |
| 8763 | CTCGGCACCCGAGAGAGACC | 212 |
| 8764 | GCTCGGCACCCGAGAGAGAC | 211 |
| 8765 | CGCTCGGCACCCGAGAGAGA | 210 |
| 8766 | CCGCTCGGCACCCGAGAGAG | 209 |
| 8767 | CCCGCTCGGCACCCGAGAGA | 208 |
| 8768 | CCCCGCTCGGCACCCGAGAG | 207 |
| 8769 | ACCCCGCTCGGCACCCGAGA | 206 |
| 8770 | CACCCCGCTCGGCACCCGAG | 205 |
| 8771 | CCACCCCGCTCGGCACCCGA | 204 |
| 8772 | CCCACCCCGCTCGGCACCCG | 203 |
| 8773 | GCCCACCCCGCTCGGCACCC | 202 |
| 8774 | GGCCCACCCCGCTCGGCACC | 201 |
| 8775 | CGGCCCACCCCGCTCGGCAC | 200 |
| 8776 | CCGGCCCACCCCGCTCGGCA | 199 |
| 8777 | TCCGGCCCACCCCGCTCGGC | 198 |
| 8778 | ATCCGGCCCACCCCGCTCGG | 197 |
| 8779 | GATCCGGCCCACCCCGCTCG | 196 |
| 8780 | TGATCCGGCCCACCCCGCTC | 195 |
| 8781 | CTGATCCGGCCCACCCCGCT | 194 |
| 8782 | GCTGATCCGGCCCACCCCGC | 193 |
| 8783 | AGCTGATCCGGCCCACCCCG | 192 |
| 8784 | CAGCTGATCCGGCCCACCCC | 191 |
| 8785 | TCAGCTGATCCGGCCCACCC | 190 |
| 8786 | GTCAGCTGATCCGGCCCACC | 189 |
| 8787 | AGTCAGCTGATCCGGCCCAC | 188 |
| 8788 | GAGTCAGCTGATCCGGCCCA | 187 |
| 8789 | CGAGTCAGCTGATCCGGCCC | 186 |
| 8790 | GCGAGTCAGCTGATCCGGCC | 185 |
| 8791 | GGCGAGTCAGCTGATCCGGC | 184 |
| 8792 | AGGCGAGTCAGCTGATCCGG | 183 |
| 8793 | CAGGCGAGTCAGCTGATCCG | 182 |
| 8794 | CCAGGCGAGTCAGCTGATCC | 181 |
| 8795 | GCCAGGCGAGTCAGCTGATC | 180 |
| 8796 | AGCCAGGCGAGTCAGCTGAT | 179 |
| 8797 | GAGCCAGGCGAGTCAGCTGA | 178 |
| 8798 | AGAGCCAGGCGAGTCAGCTG | 177 |
| 8799 | CAGAGCCAGGCGAGTCAGCT | 176 |
| 8800 | TCAGAGCCAGGCGAGTCAGC | 175 |
| 8801 | CTCAGAGCCAGGCGAGTCAG | 174 |
| 8802 | GCTCAGAGCCAGGCGAGTCA | 173 |
| 8803 | GGCTCAGAGCCAGGCGAGTC | 172 |
| 8804 | GGGCTCAGAGCCAGGCGAGT | 171 |
| 8805 | GGCCGACGGCCCACCTGGGCTTCG | 351 |
| 8806 | GCCGACGGCCCACCTGGGCT | 352 |
| 8807 | CCGACGGCCCACCTGGGCTT | 353 |
| 8808 | CGACGGCCCACCTGGGCTTC | 354 |
| 8809 | GACGGCCCACCTGGGCTTCG | 355 |
| 8810 | ACGGCCCACCTGGGCTTCGT | 356 |
| 8811 | CGGCCCACCTGGGCTTCGTG | 357 |
| 8812 | GGCCCACCTGGGCTTCGTGA | 358 |
| 8813 | GCCCACCTGGGCTTCGTGAA | 359 |
| 8814 | CCCACCTGGGCTTCGTGAAC | 360 |
| 8815 | CCACCTGGGCTTCGTGAACA | 361 |
| 8816 | CACCTGGGCTTCGTGAACAG | 362 |
| 8817 | ACCTGGGCTTCGTGAACAGT | 363 |
| 8818 | CCTGGGCTTCGTGAACAGTG | 364 |
| 8819 | CTGGGCTTCGTGAACAGTGG | 365 |
| 8820 | TGGGCTTCGTGAACAGTGGG | 366 |
| 8821 | GGGCTTCGTGAACAGTGGGA | 367 |
| 8822 | GGCTTCGTGAACAGTGGGAG | 368 |
| 8823 | GCTTCGTGAACAGTGGGAGG | 369 |
| 8824 | CTTCGTGAACAGTGGGAGGG | 370 |
| 8825 | CGCTGAGGCTCTAGAAAAGTCGAGAG | 446 |
| 8826 | ACGCTGAGGCTCTAGAAAAG | 445 |
| 8827 | GACGCTGAGGCTCTAGAAAA | 444 |
| 8828 | GGACGCTGAGGCTCTAGAAA | 443 |
| 8829 | AGGACGCTGAGGCTCTAGAA | 442 |
| 8830 | TAGGACGCTGAGGCTCTAGA | 441 |
| 8831 | CTAGGACGCTGAGGCTCTAG | 440 |
| 8832 | CCTAGGACGCTGAGGCTCTA | 439 |
| 8833 | TCCTAGGACGCTGAGGCTCT | 438 |
| 8834 | GTCCTAGGACGCTGAGGCTC | 437 |
| 8835 | AGTCCTAGGACGCTGAGGCT | 436 |
| 8836 | GAGTCCTAGGACGCTGAGGC | 435 |
| 8837 | TGAGTCCTAGGACGCTGAGG | 434 |
| 8838 | GTGAGTCCTAGGACGCTGAG | 433 |
| 8839 | GGTGAGTCCTAGGACGCTGA | 432 |
| 8840 | AGGTGAGTCCTAGGACGCTG | 431 |
| 8841 | AAGGTGAGTCCTAGGACGCT | 430 |
| 8842 | AAAGGTGAGTCCTAGGACGC | 429 |
| 8843 | CTCGTCCCCGTGAGCTTGAATCATCCGACCC | 480 |
| 8844 | TCGTCCCCGTGAGCTTGAAT | 481 |
| 8845 | CGTCCCCGTGAGCTTGAATC | 482 |
| 8846 | GTCCCCGTGAGCTTGAATCA | 483 |
| 8847 | TCCCCGTGAGCTTGAATCAT | 484 |
| 8848 | CCCCGTGAGCTTGAATCATC | 485 |
| 8849 | CCCGTGAGCTTGAATCATCC | 486 |
| 8850 | CCGTGAGCTTGAATCATCCG | 487 |
| 8851 | CGTGAGCTTGAATCATCCGA | 488 |
| 8852 | GTGAGCTTGAATCATCCGAC | 489 |
| 8853 | TGAGCTTGAATCATCCGACC | 490 |
| 8854 | GAGCTTGAATCATCCGACCC | 491 |
| 8855 | AGCTTGAATCATCCGACCCC | 492 |
| 8856 | GCTTGAATCATCCGACCCCG | 493 |
| 8857 | CTTGAATCATCCGACCCCGC | 494 |
| 8858 | TTGAATCATCCGACCCCGCA | 495 |
| 8859 | TGAATCATCCGACCCCGCAG | 496 |
| 8860 | GAATCATCCGACCCCGCAGG | 497 |
| 8861 | AATCATCCGACCCCGCAGGC | 498 |
| 8862 | ATCATCCGACCCCGCAGGCC | 499 |
| 8863 | TCATCCGACCCCGCAGGCCT | 500 |
| 8864 | CATCCGACCCCGCAGGCCTC | 501 |
| 8865 | ATCCGACCCCGCAGGCCTCC | 502 |
| 8866 | TCCGACCCCGCAGGCCTCCC | 503 |
| 8867 | CCGACCCCGCAGGCCTCCCG | 504 |
| 8868 | CGACCCCGCAGGCCTCCCGG | 505 |
| 8869 | GACCCCGCAGGCCTCCCGGG | 506 |
| 8870 | ACCCCGCAGGCCTCCCGGGG | 507 |
| 8871 | CCCCGCAGGCCTCCCGGGGG | 508 |
| 8872 | CCCGCAGGCCTCCCGGGGGT | 509 |
| 8873 | CCGCAGGCCTCCCGGGGGTG | 510 |
| 8874 | CGCAGGCCTCCCGGGGGTGT | 511 |
| 8875 | GCAGGCCTCCCGGGGGTGTC | 512 |
| 8876 | CAGGCCTCCCGGGGGTGTCG | 513 |
| 8877 | AGGCCTCCCGGGGGTGTCGT | 514 |
| 8878 | GGCCTCCCGGGGGTGTCGTA | 515 |
| 8879 | GCCTCCCGGGGGTGTCGTAT | 516 |
| 8880 | CCTCCCGGGGGTGTCGTATA | 517 |
| 8881 | CTCCCGGGGGTGTCGTATAA | 518 |
| 8882 | TCCCGGGGGTGTCGTATAAA | 519 |
| 8883 | CCCGGGGGTGTCGTATAAAG | 520 |
| 8884 | CCGGGGGTGTCGTATAAAGG | 521 |
| 8885 | GCTCGTCCCCGTGAGCTTGA | 479 |
| 8886 | TGCTCGTCCCCGTGAGCTTG | 478 |
| 8887 | CTGCTCGTCCCCGTGAGCTT | 477 |
| 8888 | CCTGCTCGTCCCCGTGAGCT | 476 |
| 8889 | TCCTGCTCGTCCCCGTGAGC | 475 |
| 8890 | CTCCTGCTCGTCCCCGTGAG | 474 |
| 8891 | GCTCCTGCTCGTCCCCGTGA | 473 |
| 8892 | CGCTCCTGCTCGTCCCCGTG | 472 |
| 8893 | GCGCTCCTGCTCGTCCCCGT | 471 |
| 8894 | AGCGCTCCTGCTCGTCCCCG | 470 |
| 8895 | GAGCGCTCCTGCTCGTCCCC | 469 |
| 8896 | AGAGCGCTCCTGCTCGTCCC | 468 |
| 8897 | GAGAGCGCTCCTGCTCGTCC | 467 |
| 8898 | CGAGAGCGCTCCTGCTCGTC | 466 |
| 8899 | TCGAGAGCGCTCCTGCTCGT | 465 |
| 8900 | GTCGAGAGCGCTCCTGCTCG | 464 |
| 8901 | AGTCGAGAGCGCTCCTGCTC | 463 |
| 8902 | AAGTCGAGAGCGCTCCTGCT | 462 |
| 8903 | AAAGTCGAGAGCGCTCCTGC | 461 |
| 8904 | AAAAGTCGAGAGCGCTCCTG | 460 |
| 8905 | GAAAAGTCGAGAGCGCTCCT | 459 |
| 8906 | AGAAAAGTCGAGAGCGCTCC | 458 |
| 8907 | TAGAAAAGTCGAGAGCGCTC | 457 |
| 8908 | CTAGAAAAGTCGAGAGCGCT | 456 |
| 8909 | TCTAGAAAAGTCGAGAGCGC | 455 |
| 8910 | CTCTAGAAAAGTCGAGAGCG | 454 |
| 8911 | GCTCTAGAAAAGTCGAGAGC | 453 |
| 8912 | AGGCGTTTCTGGAAGAGAATGAGAACG | 604 |
| 8913 | GGCGTTTCTGGAAGAGAATG | 605 |
| 8914 | GCGTTTCTGGAAGAGAATGA | 606 |
| 8915 | CGTTTCTGGAAGAGAATGAG | 607 |
| 8916 | CAGGCGTTTCTGGAAGAGAA | 603 |
| 8917 | GCAGGCGTTTCTGGAAGAGA | 602 |
| 8918 | GGCAGGCGTTTCTGGAAGAG | 601 |
| 8919 | GGGCAGGCGTTTCTGGAAGA | 600 |
| 8920 | GGGGCAGGCGTTTCTGGAAG | 599 |
| 8921 | TGGGGCAGGCGTTTCTGGAA | 598 |
| 8922 | GTGGGGCAGGCGTTTCTGGA | 597 |
| 8923 | GGTGGGGCAGGCGTTTCTGG | 596 |
| 8924 | AGGTGGGGCAGGCGTTTCTG | 595 |
| 8925 | GAGGTGGGGCAGGCGTTTCT | 594 |
| 8926 | AGAGGTGGGGCAGGCGTTTC | 593 |
| 8927 | CGTCAAAAGCAGGCACGAGCAACCTG | 701 |
| 8928 | GAACGAACCAAAGGAGCAAGGCG | 742 |
| 8929 | CGCTGACAAGGGTGCCTAGGCCCGG | 1318 |
| 8930 | GCGCTGACAAGGGTGCCTAG | 1317 |
| 8931 | TGCGCTGACAAGGGTGCCTA | 1316 |
| 8932 | TTGCGCTGACAAGGGTGCCT | 1315 |
| 8933 | ATTGCGCTGACAAGGGTGCC | 1314 |
| 8934 | CATTGCGCTGACAAGGGTGC | 1313 |
| 8935 | TCATTGCGCTGACAAGGGTG | 1312 |
| 8936 | CTCATTGCGCTGACAAGGGT | 1311 |
| 8937 | GCTCATTGCGCTGACAAGGG | 1310 |
| 8938 | TGCTCATTGCGCTGACAAGG | 1309 |
| 8939 | TTGCTCATTGCGCTGACAAG | 1308 |
| 8940 | CTTGCTCATTGCGCTGACAA | 1307 |
| 8941 | CCTTGCTCATTGCGCTGACA | 1306 |
| 8942 | CCCTTGCTCATTGCGCTGAC | 1305 |
| 8943 | TCCCTTGCTCATTGCGCTGA | 1304 |
| 8944 | CTCCCTTGCTCATTGCGCTG | 1303 |
| 8945 | TCTCCCTTGCTCATTGCGCT | 1302 |
| 8946 | CTCTCCCTTGCTCATTGCGC | 1301 |
| 8947 | TCTCTCCCTTGCTCATTGCG | 1300 |
| 8948 | CGCAATTCCGTATTTGTTCCGG | 1738 |
| 8949 | GCAATTCCGTATTTGTTCCG | 1739 |
| 8950 | CAATTCCGTATTTGTTCCGG | 1740 |
| 8951 | AATTCCGTATTTGTTCCGGG | 1741 |
| 8952 | ATTCCGTATTTGTTCCGGGT | 1742 |
| 8953 | TTCCGTATTTGTTCCGGGTC | 1743 |
| 8954 | TCCGTATTTGTTCCGGGTCT | 1744 |
| 8955 | CCGTATTTGTTCCGGGTCTG | 1745 |
| 8956 | CGTATTTGTTCCGGGTCTGC | 1746 |
| 8957 | GTATTTGTTCCGGGTCTGCA | 1747 |
| 8958 | TATTTGTTCCGGGTCTGCAT | 1748 |
| 8959 | ATTTGTTCCGGGTCTGCATG | 1749 |
| 8960 | TTTGTTCCGGGTCTGCATGA | 1750 |
| 8961 | TTGTTCCGGGTCTGCATGAG | 1751 |
| 8962 | TGTTCCGGGTCTGCATGAGC | 1752 |
| 8963 | GTTCCGGGTCTGCATGAGCA | 1753 |
| 8964 | TTCCGGGTCTGCATGAGCAA | 1754 |
| 8965 | TCCGGGTCTGCATGAGCAAA | 1755 |
| 8966 | CCGGGTCTGCATGAGCAAAT | 1756 |
| 8967 | CGGGTCTGCATGAGCAAATA | 1757 |
| 8968 | CCGCAATTCCGTATTTGTTC | 1737 |
| 8969 | GTACGTTGGCAGACGCAGTGACG | 4923 |
| 8970 | TACGTTGGCAGACGCAGTGA | 4924 |
| 8971 | ACGTTGGCAGACGCAGTGAC | 4925 |
| 8972 | CGTTGGCAGACGCAGTGACG | 4926 |
| 8973 | GTTGGCAGACGCAGTGACGT | 4927 |
| 8974 | TTGGCAGACGCAGTGACGTA | 4928 |
| 8975 | TGGCAGACGCAGTGACGTAT | 4929 |
| 8976 | GGCAGACGCAGTGACGTATT | 4930 |
| 8977 | GCAGACGCAGTGACGTATTT | 4931 |
| 8978 | CAGACGCAGTGACGTATTTG | 4932 |
| 8979 | AGACGCAGTGACGTATTTGA | 4933 |
| 8980 | GACGCAGTGACGTATTTGAG | 4934 |
| 8981 | ACGCAGTGACGTATTTGAGA | 4935 |
| 8982 | CGCAGTGACGTATTTGAGAG | 4936 |
| 8983 | GCAGTGACGTATTTGAGAGT | 4937 |
| 8984 | TGTACGTTGGCAGACGCAGT | 4922 |
| 8985 | ATGTACGTTGGCAGACGCAG | 4921 |
| 8986 | CATGTACGTTGGCAGACGCA | 4920 |
| 8987 | TCATGTACGTTGGCAGACGC | 4919 |
| 8988 | ATCATGTACGTTGGCAGACG | 4918 |
| 8989 | TATCATGTACGTTGGCAGAC | 4917 |
| 8990 | GTATCATGTACGTTGGCAGA | 4916 |
| 8991 | GGTATCATGTACGTTGGCAG | 4915 |
| 8992 | GGGTATCATGTACGTTGGCA | 4914 |
| 8993 | TGGGTATCATGTACGTTGGC | 4913 |
| 8994 | CTGGGTATCATGTACGTTGG | 4912 |
| 8995 | GCTGGGTATCATGTACGTTG | 4911 |
| 8996 | TGCTGGGTATCATGTACGTT | 4910 |
| 8997 | TTGCTGGGTATCATGTACGT | 4909 |
| 8998 | CTTGCTGGGTATCATGTACG | 4908 |

Hot Zones (Relative upstream location to gene start site)
1-800
1200-1800
4800-5100

### Examples

Genetic Code (5′ Upstream Region)

(SEQ ID NO: 11978)

TGAAGACTATAGCCCCTTTCTTTTGGCTGATTTCTCCCTTTTGGAATGGG
AATGTTTACCCAGTGCTGGTACTCCCATTATATCTTGGAAGTAAATAACT
TGTTTTGATTTTACAGGCTCATAGATGGAAAGAGATGAGTCTCAGATGAG
ACTTTGGACTTGGAATTTGGACTTTGGACTTTTGAGTTAATGCTGGAACA
AGTCAAGACCTTGGAGGACTGTTGGGAAGGCATGATTGTATTTTGAAATG
AGAGAGGGACATGAGATTTGAGAGGGGCTGGGGCAGAATGATATAGTTTG
TGTACTTATCCCCACCCAAATCTCATGTGGAATTGTAATCCCTAGTATTG
GAGGCGGGACCTGGTAGGAGGTGATTGGATCATGGGGGTGGATTACTCAT
GAATCGTTTAGCACTATCTGTTTGTTGCTGTCCTTGTGATGAGTGACTTC
TCATGAGATCTGGCTGTTTAAAAGTGTGTGGCACCATGCTTTCTCTTGTT
CCCGGTCTGGTCATGTGACATCCCTACTCCCCCTTCACCTTCCATCATGA
TTGTAAGTTTCCTGAGGCCTCACCAGAAGCCAAGCAGATGCCAGCATCAG
GCTTCCTGCAAAGCCTGAAGAATCATAAGCTGATTAAATCTCTCTCTCTT
TTTTTTTGAGATGGAGTCTCATCCTGTGGCCCACGCTGGAAGGCAGTGGC
ACTATCTCTGCTCTGAGGCTCAAGTGATTCTCCTGCCTCAGCCTCCTGAG
TAGCTAGGATTACAGGTGCATGCCACCACACCCAGCTAATTTTTGTATTT
TTAGTAGAGATGAGGTTTCACCACGTTGGCCAGGCTGGTCTCGAACTCCT
GACCTAAGGTTATCTGTCCACCTCAGCTTCCCAAAGTGCTGGGATTACAG
GTGTGAGCCATTGCACCCGGCCTCTTTTCTTTATAAACTACCTAGTCTCA
GATATTTCTTTTTGGCAATGCAAGAATGGCCTAATACACCAAGATTTGTG
TTTTCACCATTTTTTTTCTGTTTATAACCATGTTATTTTACTGTTTATCT
GAGAAAAGAACCTGGCCTGTTAGTATTTTTTATCGACTGACAAACTCACC
AGAATAAAGTGGGTATTAGGACCCTTGGTTCTGCAAGATTTTGGTAACAG
AATCTGTTTTCACTAATTGTTGGGAAACAGAAATGATATTCCTTTTAGAC
CTAGCTCCCTAAACCTTTTCCTCGTTTTGCTTTTTGGTACAATAATGAGG
GCTGGCAGGGCTACTTGACACCATTAGCAGTAGACAAATTTTTCAATAAG
GACTAACAGAGAAAAACTATGGAAATTCTGATTTATTGTTTGGCCGAGAG
AGTTCTCTGTCTCCTTGTGCCCTTGCTCTCCATGTATATTTTATGAGACA
TTTCAGCAAAGGCATCTCTCAAAATTAATCCCATAGCTGTCTCCTTCAAT
TCTCCTCCTTGAAACTCTTCACCAATCTTCATAGGGCCTTGGCCACTTCT
TGAGGGCCCTCCCACCAGATGATTAAAGGCAATACAGTGAACGAAAGTCT
TATTCCGAGACTTGTCTTTGTAAACTTAGTGATCCTTCTTCCTTTTCACT
TACGAAAATTTAAAGAGAAGCAGTCTCAAATGTGAACTGAATGCCGTCCC
ATTACTCCCCCAAACTGGGAAGAAGCTGGTCATATACTTGCACATTTATA
TAATAAATATTCAAAGACTCTAATCTGGTATCTTCCATATAACACACACT
TTAACTCCTATTTTAAACTTTCAAAAGGCTTTTTATGGCATCTTATGCCC
TACTTTAAAATGTCTGTCAGCCTAATATTTCTACTTTTTTTTTATTAATT
TATTTTCAAGGTCATGTGTGAAAACAACTTTCAGTGAAAAGAACCCATCT
GCTTTGACAAAAATGTACACTATAAACCTTCACTTCTACAAGGGTCTAAA
AAAATTCAAGGGTTTGATTCGAATGCTTCCAAACCACATTCCCTAAAGCA
TGCTTTGTGCAACACTAGGAGTTGGTGCAGCAAACAAAAACAAGGAATGG
GGAGAGGTGCCAGGCAGGCGCGGTGGCTCATGCCTGTAATCCCAGCACTT
TGGGTGACCCAGGCAGGTGGATCACTTGAGGTCAGGAGTTCGAGATCAGT
CAACATGGTGAAACCCCGTCTCTTCTAAAATACAAAAATTAGCTAGGTGT
GTGTGCACGTAATCCCAGCACTTTGTGAGGCTGAGGTGGGTGGATCACTT
GAGGTCAGGAGTTCAAGACCAGCCTGGCCAACATGGTGAAACCCCATCTC
TACTAAAAATACAAAAAAAAAAATTAGCCGGGTATGGTGGCACACACCTG
TAATCCCAGCCACTCAGGAGGCTGAGGCATGAGAATTGCTTGATCCCTGG
AGGCAGAGGTTGCAGTGAGCAGAGATCATGCCTGGGGAAAAGAGAGAGAC
TATGTCTCAAAAAAAAAAAAAAGAAAAAAGAAATAGGGAGAGGGAGTGAT
GCTACATACTGAAGCTACCTACCCTCTTTAAAATTCAAAATGCAGATTAT
CATCTTAAAGAATTGTATGCATTTTAAAGTGAAGGTATTTGTTTAATTTT
GTTTAACCTCTTATTTCTCAAAGTTACTTGATTACAGAATTCTTTTCGGG
TATGCATGCAATACCGAGCAACATATGACCGAGCTAGGGTTCCATGGTAC
ACAGTTTGGAACTTGTGCTAGAAAATGTTACTCATTATTTTATAAGAAGT
ATTATTCCAAGGCATCTATGCATTGGAAAATAATCTTGATATGAAATATG
ACTCGATCCCTTCTCATACCATATTTACAGGGTATGGTGGTTAACTTTAT
GTGTCCACTTGTCTCTTAGCCCATCCTGGGTTAAGGGATGCCCAGACAGC
TGGTAAAATATTATTTCTGGGAGAGTCTGTGAGAGTATTTCTGGAAGAGA
TTAGCATTTGAATCAATAGACTGGGTATCAAAAACCCATCCTCACTAATG
TGAGTGGGCATCATTCAATTAACTGAGCATAGGAATCATAAAAGAGGTGG
AGGAAGGCAAATTTGCTCTCTCTTCTGAAGCTGGGACATCCATCATCTGC
TCCTGCCCTTGACTTCAGAGCTCCAGGTTCTTGAGCCTTCAATACCAGCA
GACACTCTTCAGCCCTTCAGCTTCACATGCAAGAATTACACTGGATTTCC
TGGTTCTTCGGCTTGCAGGGGGCACATATTGGAACTTCTTGGCCTTTATA
ATCTCCTGAGCCAATTCCTATAAGAAGTGTCTTTATATATCTATATATAT
CCCATTGGTTCTGTTTGTTTGGAAAACCCTGATACACAGGGCTATCTATA
GCTCACCCCCCAAGTACTAAGTCTCCAGATGATTATTAGGTTCTTATAAA
CACAAAATATATATGCTTATTTTGTAATATCAGGTTGTTAACTTCATCTG
AGTAGTTTTCAGCACATATGATGGGGATAAGTCATCAGTTATGACAGACA
ACTTCCGGAGTTACATCACCAATGTTCATCTATCACTCACCTTTGCTTCA
AACTTTATGCATCATATTCAAGTTAATTCCTATTGCATGTACTTCTGATT
TCCACCTACAAAATGAACATTAAATTTATTATTTCCCTCATTTAAAAAAA
AAGATTTCAGGCCAGGTGCAGTGGCTCATGCCTGCAATCACAGCACTTTG
GGAGGCTGAGGCGGGTGGATCACTTGAGGCCAGGAGTTCAAGACCAGCCT
AGGCAACATGATGAAACCCCTATCTCTACTAAAAATACAAAATACAAAAA
AAAAAAAAATTAGCCAGGTGTATGTGTGCCTGCAATCCCACCCCTACTCA
GGAGGCTGAGGCAGGAGGATAGCTTGAGTTCTGGAGGCGGAGGTTGCCGT
GAGCCAAGATCACGCCACTGTACTCAAGCCTGGGCAAGACAGCAAGACTG
AGACTCTGTCTCAAAAAAAAAAAAAAAAAAAGTTTTCAAATCACTTTTTC
TCCTTTGCAGTTCAGCATTGTCACTAAAGGTGTCCAGGTTAGACAGAACT
GGGTACAAACCCTCCTTTCTCTTCCCCTTACTCTTTCACCTCTTCATTTG
TGACATGCAATGTTAACCCAATACAACTCATGAGTATTCAGAGATCCCGT
CTGTATACGTCCTCAGCCTGACATACTGTAATCCTTAGGCATCCTTATTA
GTAATAAGATGTCCTTGTGTGATTTTTTCACAAACTTTTCACAGACCCTA
TCTATGTTCATTCCTGGAACCTCTGGCACATTCTTCTTCCTTCTCTTCCC
AATCTCAACTTTTTCATCCTCTGAATCTCCCTATACTTTCCCCGTGGACA
AGCCTCTAGAAATGTTAAAATGTCAGATCATGATTGGTAAATCTGTAGTG
ACTAATTGCCCACTGCTGCCTATTCCATCTGACCTAAATTCCTCAGGTCT
TCTAACATTAAGACCTCTTCCTGGCCGGTTGTGCTGGCTCATGCCTGTAA
TTCCAACACTTTAGGCAGCTGAGGCAGGCAGATCACTTGAGGTCAAGAGT
TCAAGACCAGCCTGGCCAACATGGTGAAGCCCTGTCTGTACTAAAAAATA
CAAAAATTAGCCGGACCTGGTGGTGCGTGCCTGTAATCCCAGCTACTCGG
GAGGCTGAGTCAGGAGAATCACTTGAACCCGGGGCAGCGGGGGAGGCTGC
AGTGAGTGGAGATCAAACCACCGCACTCCAGCCCAGGTGACAGAGCAAGA
GTCAGTCTCAAAAAAAAAAAAACAAAAAAAAAAACCTCTTCCTATAGCTA
ACTCCCACTTACCACCCCCATCATGAACACTCTTGATGTATTTACATGGT
TTCTCCTTCGAACATCCTCCTTTCTTCTTTCTTAATGGTTGTTATCAAAT
ACCCTGATAAAAAACAAAAACAAAAAACCTCCTCTGAAGGTCCCTTATTC
ACCCTTCCAACGCTACAGGTCTGTAACTCTCATTTTCTTTTTAAAAAATT
TTTATTTTTTTAATTTATTTTATTTTTTTTTTCAGACGGAGTCTTGCTCT
GTCGCCCAGGCTGGAGTGCAGTGACACGATCTCGGCTCACTGCAACCTCC
ACTTCCCAGGTTCAAGCAATTCTCCTGCCTCAGCCTCCTGAGTTGCTGGG
ATTACAGGTGCCTACCACCACACCTGACCTCAAGTAACCCACCCACCTCG
ACCTCCCAAAGTGCTGAGAATACAGGTGTGAGCCATCATGCCTGGCCAAA
ATTTTTAAATTTTAAAAAATATATTTTATTTTTTGTAGAGACAGGGTCTC
ATTTTGAGCCCAAACTGGTCTTGAACTCCTAGGCTCAAGTGATCCTCCTG
CCTTGGCCTCCCAAAATGCTGGGATTATAGGCACAAGCCACCAGGCCTGA
TCCTTACTTTTCTTCTGATGAATTCACATATATGTGCACAAATACTTTAT
ACTAAATTGTATTTACTGATGTACTTTTTTCACTGTGCCTTTTCTTTTTC
TTGCCCAGATATTTTTCTCATATAAACATTAGCTCCTTAATGGGAGCAAA
TGAACCAGTTTTTTTTTAATTCCCACCCAAAGTGAGAATATAAAAATTTT
TTATTGATCCACCAATACTGAACACTTTCATTTCTAATAGTTATATTTAA
CTGAATAAATTACACACGGGACAAAAATGTTATTTAAGGGATAAAGTTGG
GTGTTTGCTCAGGGACAACGTTGTATATTGAATGATTTGGTGCTTTTGTG
AATTTATCATTCAAAAGACCATCGTGATGGCTAAATAACAGAAAGGAGAG
CTTTATTGGCAATATCAATTTGCAAACCCGGAAGACATAGTCTTCGGTGT
ATGCTGAATGTGGTCTCTCTTCAAAAGAGAGGAAGGACAGTTGGGTTTCA
TGCCTCACAGGGTCTGTTTCACACAGTGGAGTCATACATATTCAGCAGGT
TTGGAGGAAAAGATATACATATTTATGAGGGGAGCTGAGTGCATGTGCAA
TGGGTAAATATGTATGTGACATCCCATGTACACTTTGGGGCAGGGTTTTA
GTGTTAAAATGAGGTAAAATTTGGCTCTTTACATCAAAAGGTGAACTACA
GGACCCAAAGACAGTTTGTGCACAGCCTCTAATAAACTGGCTGACACTGG
CTTAAGGTCTGCAATTGCTTATCAGAAAAGAATGTTTGTAAGGCTGGTCC
TCATTCCAATTAGAGTTGTAGTGGTCTGGGTTGTAAATCACAGGATGGGG
CTGATAGTTCCTATTATTAGGGAGTTTAGAGCCATAGAAATTGAGAAATT
GGTCATGCCAGCCAGTCCCCGAACCCTAACCCTGTAGGTAACTTTGTTTC
CTTAACCTTACAGTCCATCTTAGGTGATAAAGGGGTGTCTGTTTTGGTAT
CTCACATCACAAATTGTTGGTTGGTTTGTGTGTTTGTTTCATCATTCAGG
ATGTTGTTTCTTTAGGGAATGTGAACCTGAATTCTCAAGGCTTGTTAGAC
TGTAATGTTCCCATTCATTTTAGGTTTAGCTCATGCTTCTCTAGCCACAG
CCTTCACTTGGATTTTAAAAGTTGAATTACTCATCAAAGTCTCTAGGACA
CGAAAGACAATCCTTAGGTATGATTTGACCAGTAAAAAAGAGATCCAGCT
GCCTTGAAGCATAAGATCCCCTCGGCTCCAATGTCTATCACTAATATTCA
GTGTGGCAAGGATCCCAGGCCACAGAGCTGTGGCTTCCTGCAGCTGCTCT
GGGGAGTGACTCTCTTGGAGCATGTGATGTGGTCTTCCATTGTGCAGGAC
CAGCCCAGTGGCATCCTTTCAACACCTCTGGCAAGCAGCCTTTCCAAGCA
CGGGTGCCGTCTGAAAACAGGAGGCATATCTTTCACATCCTAGGCACACG
CCCTAGGGAGTGGTCAGGGTTTTGTCCAGTTCTCAGCAAACTAGCTACAG
CTCCATCCCTTACTCCCACACTCAAGAGAGATACTAGAATACAACTGAGA
GTAGCCTGATATGATGCTAACCTCGAGTTGCTTTTATTTAAATTAAAATA
AATCAACCAGACACAGTGGCTCATGCCTATAATCCCTGCATTTTAGGAGA
TCAAGGAGGGTGGATCACGAGCTCAGGAGTTTAAGACCAACCTGGATAAC
ATGGCAAGACCCCATCTCTACAAAAAGTACACAAATTAGCTGGACATGGT
AGTGCGCACCTGTAGCCCCAGCTACTCTGGAGGCTGAGGTGAAGGATCAC
TTGAGCCCAGGAGGTAGAGGTTGCAGTGAGCTGAGATTGTGCCACTGCTA
ATAATTAATTAAATAATTAATTAAATTAATAAATCGTGCCACTTTATTAA
ATAAATAAAACAAGAGTAAATCACTCACAAATTTGGAGCTTTTATTAGCA
AAACATTACTTAGGAAATCTAAATAAATAACACGGGGTTGACAGCCATTG
TTCTAACTGGCAGCCCCTGGCAAGCTCAAAGCCAGGATTATGCTGGTCAC
TTAAGTGACAGCTATTGCGAATTGTTGTTCTCTCAAGAAAAAAGAACCGA
TTTCTATGGTAAACCAGGCACTGTGCTGGGTGCCTTTACAATTCATCACC
ACACCACCTAATGAAAGGAGCATTCTTCAGAAACTGTAGTGCTCAGGCTT
TCTCAAGGCCTGAGTTCTTTTCCACCAGAGCATATTGTTGCCCTATTATC
CAAAGTTCTCTAAGGAAGAGAACTGACGTAAGACCCACATGGCTCCATTA
CATCTTCTGGCTACTTGATTGATTTTCATACTCCCTACCTCTGGGGTTGG
TATGTACTATCTATTTCTTTCTCCTCTCGTTCTTCCTTTTTATTCCATAA
AATACAGGAATATTCCTGTACATTAGTCCTTGCAGCAACCTTGGAATTAC
TACATTCCTCAAACAAGTTATGGAAGCCAGCTGCCAATATTGGTCCCTGG
TTAAACAGTGAATTCTGTTGTTCCATAGAGTTACTACTGAAATACCTAAG
CCATTTTGTAAAATATAATTTAGTTGATCTGAAGGCTGTCTCTAAAGCAG
TTTTATGTAGTGATTACAGAGAAGGACTAATTTCAAGAGTATTTTATTGT
TTAAAAAAATGTAAACATTTTATGGATGCACTAGTGAAGTAAAGACCAAT
AAATGAAGCAGTAACTTTAATAAAAGGGTAAGTAAAATGTCACATCCTCT
GCCTATATTCAGGTCTGTTAGGTATGTGTAGTTAAATGTAGGTAAGTTAG
TTGATAATTATTTATTTAAGCATTTCTTTATGTCTACTCATTAAAAAGAA
AAAAAGATTAAAAGAATGTTACTATGTGAAAAACTGCCCATCACTGGGGA
AAAGAATTTTATTATGCAAAGCTTCAACGCTATTTACAGTTTAGACTTTT
GTAGCTATTGAAGGCTGACATTGAGATAAAGAAGTTAATCATGTCCTTCT
GTCTTGGAGGAGGTAGAAAGAGATGAGAATGAATACAATTCAGGATCTAC
TTCTGGTCTTTGATGAGGAGTTAGCACACGGTTCTGGGAGGAAAGACAGG
TTAAGAGGCATGTGAAACTCTCAAATACGTCACTGCGTCTGCCAACGTAC
ATGATACCCAGCAAGCTCACATCTTCATGGAAAGCATGGTAATTCCCAAC
ACTACCGGAAGTCTGGAGTGGCTAAGTAATCCATATATTCAACCAGGAAG
CAGCTAAAGAAATATTCTAATTACCTAGGAAGGTTTCTGATTTCAAAAGG
ACATGAATAAAAAGTAGAAGGAATCCACTCCCAAGGACGGACATCAGAGT
AGCTTAAAATGTGAGAATAATTTTAGGGGAATTTTAGAGGTTTGGTTATA
GACTTATGTTCCCCCAAAATTCATATGTTGAAGCCCTAACCCCCAGTACC
TTAGAACATGACTGTATTTGGGTAGGGCCTTTGAAGAGCTAATTAAATTA
AGGCCACTGGCGTGGGCCCTAATATAATCTGGCTGGTATTCTTGTAAGAG
GAGGAGATTAGGACACACAGAAATACCAGAGGTACCTGTGCAGAGGAAAG
AACGTGTGAGGACTTAGCAAGGGTGCAGCCATCTGCAAGCCAAGGAGACC
TCTGAGGATTCCAATCCTATCTGCATCTTGATCTTAGACTTTTCTGGAAC
TGTGAGAAAATAAATTTCTTGGTTTAAGCCACCCAGTCTGTGATATTTTG
TTATGGCAGCTCTAGTAAACTAATACAGATTTTAAATGTCATTAAATGTC
AATGTTTAAGCTTTGACAAAATTTTCTAAAGGAAAGTATAAAAGGTCATT
TTCTTTCTTTTCAGAGCCTGATGATTGCGGGAGGGGTAAGCCAGCTGCAT
GGGGATCATGATGCAATGCTGATGCAGGACAGACAGAAAGTAGATCTCTT
CCATTTCTATTTTTTTTTTTTCTGTTGAGTTGAATGATCTTCAGACTGAA
AATGAAAGAAAGGTCACTGGAAATAAAGGCCAAAGATGAGTGACAGGATT
ATAGAATAAGTCTTAGCTGTTCTAAAGAAGGACATATTATGTACCCCCAC
CCCCAAATTCATATGTTGAAGTCCTAACCCGACAGTGTCTCAAAATGTGA
CCATATTTGGAGATAGGGTCAAAGATGTAATTAAGGTTAAATGAGGTCAT
TAGCATGGATCCTAACCCAATATCTGCTGTCCTTATAACAAGAGGAGATT
AGGGCACAGTAAGACACAGAGGGAAGACCATGTGAGAATACAGGGAGAAG
GTGGCCATCTGCAAGCCAAGGAGAGAGGCCTCAGAAGTAACCAACTCAGC
CAACACCTCGATTTCAGACTTCCAGCCTCCTGAAATGTGAGGAAATACAT
TTCTGGTGTTTGATCCATCCAGTCTATGGTAAGTTATGGCACCCCTGCAG
GGTTCATCTGGCTCAGACTTAACGATTGCTTTTGGTGATATTTATAGGGC
ACAGATAACAGCCTAAACACAAGACGACAGAAACGCGGCCCAGCAGACTA
TGCATAAAATAGAAATGGGGTATCTGGACCAATTGGAGTCTGCAGTGGGA
TGCGGTTACTAAAACAGTCAAATGCAACATGAGGCTCCAGGCAGAGTAGT
GGGCAACATCTCCCATGTTGCAGCAGTCAGAGCACACTTCGAGTACTGTA
AAAAGACACAGACAAGCCAGAACACATTTAGAGAATGGCCAAGGTGTGGA
AGGAACCAGAAACCATGCCATTATGCAACTGTTGAAGGAAGTGCCTGTTT
TACCTTGTGAAGAGAAGACTCTAGAGGAAGAAGTAGCATGAAAACCGCTG
GCAAATTTGTAAAGATCTGAAGTGTGGAAAAGAATTATTCTGCTTGGTCA
CTGGGGATACAAGGATATCTGAGTGGGAGTTTAAAGGCGGGGGATGTGAG
CTTTAAATGGGATAAGAACATTCTAGTAACCAGAAATGCCCAAAGATAGA
ATGCACAGTCTGGAGAGCCAGTGAATATCTCACAAATGGAGACACTTGAA
ACTAGGATGGGGATGCTGTTGTAGGAATTCCAGCAGACAAGTGGTTGTTG
GTTCCTTCCCCAACTTTGTAGGGTTATAACTAGGGATGTTCCTGCGTTTT
CTGCTTGGAGGATCTGCAAGACACCTCAGGGCAGGAAATGGCATTAAATG
CAGAACAGAGCTAGTGGCTGAAAAGCAAAAAGCCATCAGGATCTCTGAGT
AGTGAAGGAACCAGAGAACATGCAGGCAATGTCCATCATTCTGACGCAAT
CAGCAGCATAATCATCTTCCCCCAGGAACATCTTGACCAGGGAATGTGTC
AGTGTGGTGAATTTCAACAGTGGAAAGAGAAACTGCTAAATCTAAGAACT
TTAATTTTTATAGATTATGATCTCATCTCTACAATTTTGAATTTCATGCT
CAATAAAAGTTCCTTACTCTCTTTTTTTTTTTTTGAGACGGAGTCTCGCT
CTGTCGCCCAGGCTGGAGTGCAGTGGCGCGATCTCGGCTCACTTCAAGCT
CAGCCTCCCGGGTTCACGCCATTCTCCTGCCTCAGCCTCCCCAGTAGCTG
GGACTACAGGCGCCCGCCACGACGCCCGGCTAATTTTTTGTATTTTTAGT
AGAGACGGGGTTTCACCGTGTTAGCCAGGATGGTGTTGATCTCCTGACCT
CGTGATCCGCCCGCCTCAGCCTCCCAAAGAAAAGTCCCTCACTCTTAAAG
TTGCCTCCTCCTTCCCAGGGCTGGCTTCATGGGCATGCAACCCTGGAGAG
TCTCACAGGCCCTGCGGTGGGAGGAGCCCCATGCTTGGTTTAACGCTCTG
CCATTGCCATCTTAAAATTCTTAATTTAATTTTTTTTCTTTTTTTTGAGG
TGGAGTCTCGCTCTGTCGCCCAGGCTGGAGTGCAATGGCACAATCTTGGC
TCACTGCAACCTCCGCCTCCCAGGTTCAAGCGATTCTCCTGCCTCAGCCT
CTGGAGTAGCTGGGATTACAGGCAGGAGTAACCACGCTCGGCTAATTTTT
GCATTTTTAGTAGAGATGGGGGTTTCACCATGTTGGCCAGGCTGGTCTAG
AACTCCTGACCTCAGGTGATCTGCCCACCTGGGCCTCCTAAAGTGCTGGG
ATTACAGGCATGAGCCACCAGGCCCGGCCTTAAAATTCTTAATAATGTAA
CAAAGGGTCTCACGTTTGCATTTTGCAGTGGACTCTGCAAGATTTGTAGC
TTTGGACCACGTTTCTCTTTGCATTCAGATACCTTCTTTTTTGCCTTATT
TGCTCATGCAGACCCGGAACAAATACGGAATTGCGGTGGGTAAATGTGGT
GCAGAAAGTGAACAACTGGGTTTGTCCTGTCACTTTAGGCTTTTCCCTGC
TGTCCCAGCTTCATGTCACTTACTTGCTATTAGATTTGGGAGTTCATTAG
CTTCATTTTCCTGATGTATAAATAGGAATAATAGTAACAGCCTCTTTGGC
TTTTGTAGGAAGTAAATGACATGAAGCGTATAAACAAATACTGCATGACA
ATAAATATTTGTCCTTATTTGTTGAGGACATCCAAAGGACATTCAGGGGC
AAAAGTAATCCAAGAGTCAAGACTGAATGCCTAGTGCGGGAAAAGACACA
CAAGACAACATTTAGGGGAGCTGGTACAGAAATGACTTCCCAGGAAGGAA
GTCTGTACCCCGCTGGCTGAGCCATCCTTCCCGGGCCTAGGCACCCTTGT
CAGCGCAATGAGCAAGGGAGAGAAGGCAGGCTGCAGTGCAGCCCTCAGAA
GGGCCAGAGCACTCCCTGGCTTCAGTCCTTCGCTCCAAGCCCTGTGTGGA
GTGGGCTGTGGCTTGGTAACTAAATGCTACTTCAGGTCAAGAGCAGGGGA
TATATCTGGGCAGTTCTAGAGCATTCTAAACTATCTGGACACTAACTGGA
CAGTGGACGGTTTGTGTTTAATCCAGGAGAAAGTGGCATGGCAGAAGGTT
CATTTCTATAATTCAGGACAGACACAATGAAGAACAAGGGCAGCGTTTGA
GGTCAGAAGTCCTCATTTACGGGGGTCGAATACGAATGATCTCTCCTAAT
TTTTCCTTCTTCCCCAACTCAGATGGATGTTACATCCCTGCTTAACAACA
AAAAAAGACCCCCCGCCCCGCAAAATCCACACTGACCACCCCCTTTAACA
AAACAAAACCAAAAACAAACAAAAATATAAGAAAGAAACAAAACCCAAGC
CCAGAACCCTGCTTTCAAGAAGAAGTAAATGGGTTGGCCGCTTCTTTGCC
AGGTCCTGCGCCTTGCTCCTTTGGTTCGTTCTAAAGATAGAAATTCCAGG
TTGCTCGTGCCTGCTTTTGACGTTGGGGGTTAAAAAATGAGGTTTTGCTG
TCTCAACAAGCAAAGAAAATCCTATTTCCTTTAAGCTTCACTCGTTCTCA
TTCTCTTCCAGAAACGCCTGCCCCACCTCTCCAAACCGAGAGAAAAAACG
AAATGCGGATAAAAACGCACCCTAGCAGCAGTCCTTTATACGACACCCCC
GGGAGGCCTGCGGGGTCGGATGATTCAAGCTCACGGGGACGAGCAGGAGC
GCTCTCGACTTTTCTAGAGCCTCAGCGTCCTAGGACTCACCTTTCCCTGA
TCCTGCACCGTCCCTCTCCTGGCCCCAGACTCTCCCTCCCACTGTTCACG
AAGCCCAGGTGGGCCGTCGGCCGGGGAGCGGAGGGGGCGCGTGGGGTGCA
GGCGGCGCCAAGGGCGCGTGCACCTGTGGGCGCGGGGCGCGAGGGCCCCT
CCCGGCGCGAGCGGGCGCAGTTCCCCGGCGGCGCCGCTAGGGGTCTCTCT
CGGGTGCCGAGCGGGGTGGGCCGGATCAGCTGACTCGCCTGGCTCTGAGC
CCCGCCGCCGCGCTCGGGCTCCGTCAGTTTCCTCGGCAGCGGTAGGCGAG
AGCACGCGGAGGAGCGTGCGCGGGGGCCCCGGGAGACGGCGGCGGTGGCG
GCGCGGGCAGAGCAAGGACGCGGCGGATCCCACTCGCACAGCAGCGCACT
CGGTGCCCCGCGCAGGGTCGCGATG

[0441] 32. HAMP

[0442] Hepcidin is a peptide hormone produced by the liver. Hepcidin plays a role in maintaining iron balance by inhibiting iron absorption across the gut mucosa and transport of iron from macrophages which serve as a depot of iron storage and transport. Hepcidin production in the liver increases when iron enters liver cells from the blood thereby causing its release into the blood. In contrast, in states of high hepcidin (e.g. inflammation), serum iron levels drop because iron remains trapped in macrophages, resulting in anemia (Ganz T. 2003. Blood 102 (3): 783-8). Beta-thalassemia a common congenital anemia is characterized by excessive iron absorption and overload of iron associated with low levels hepcidin levels. In this situation, increasing expression of hepcidin may be therapeutic to treat the abnormal iron absorption in individuals with β-thalassemia and related disorders. Mutations in this gene cause hemochromatosis type 2B, also known as juvenile hemochromatosis, a disease caused by severe iron overload resulting in cardiomyopathy, cirrhosis, and endocrine failure.

[0443] Protein: HAMP Gene: HAMP (Homo sapiens, chromosome 19, 35773410-35776064 [NCBI Reference Sequence: NC_{—}000019.9]; start site location: 35773482; strand: positive)

Gene Identification

| | |
|---|---|
| GeneID | 57817 |
| HGNC | 15598 |
| HPRD | 05925 |
| MIM | 606464 |

Targeted Sequences

| | | | Relative upstream |
|---|---|---|---|
| Sequence | Design | | location to gene start |
| ID No: | ID | Sequence (5′-3′) | site |
| 8999 | | CGTGCCGTCTGTCTGGCTGTCCCAC | 1 |
| 9005 | | CGAGTGACAGTCGCTTTTATGGGGC | 60 |
| 9035 | | CGGGGCATGGCCAGCAGCCGCCAGG | 424 |
| 9086 | | CGTGTGCCCGATCCGCACGTGGTGT | 563 |
| 9121 | | CGACAGGCTGACGGGCCAAGCTTGG | 2344 |
| 9150 | | CGGATGGGCAGGGAGGATACCGTTT | 3109 |
| 9151 | | CGTGGGCGGCGGCGGCTGCGTGGTG | 3287 |

Target Shift Sequences

| | | Relative |
|---|---|---|
| | | upstream |
| Sequence | | location to gene |
| ID No: | Sequence (5′-3′) | start site |
| 8999 | CGTGCCGTCTGTCTGGCTGTCCCAC | 1 |
| 9000 | GTGCCGTCTGTCTGGCTGTC | 2 |
| 9001 | TGCCGTCTGTCTGGCTGTCC | 3 |
| 9002 | GCCGTCTGTCTGGCTGTCCC | 4 |
| 9003 | CCGTCTGTCTGGCTGTCCCA | 5 |
| 9004 | CGTCTGTCTGGCTGTCCCAC | 6 |
| 9005 | CGAGTGACAGTCGCTTTTATGGGGC | 60 |
| 9006 | GAGTGACAGTCGCTTTTATG | 61 |
| 9007 | AGTGACAGTCGCTTTTATGG | 62 |
| 9008 | GTGACAGTCGCTTTTATGGG | 63 |
| 9009 | TGACAGTCGCTTTTATGGGG | 64 |
| 9010 | GACAGTCGCTTTTATGGGGC | 65 |
| 9011 | ACAGTCGCTTTTATGGGGCC | 66 |
| 9012 | CAGTCGCTTTTATGGGGCCT | 67 |
| 9013 | AGTCGCTTTTATGGGGCCTG | 68 |
| 9014 | GTCGCTTTTATGGGGCCTGC | 69 |
| 9015 | TCGCTTTTATGGGGCCTGCC | 70 |
| 9016 | CGCTTTTATGGGGCCTGCCA | 71 |
| 9017 | CCGAGTGACAGTCGCTTTTA | 59 |
| 9018 | ACCGAGTGACAGTCGCTTTT | 58 |
| 9019 | GACCGAGTGACAGTCGCTTT | 57 |
| 9020 | GGACCGAGTGACAGTCGCTT | 56 |
| 9021 | GGGACCGAGTGACAGTCGCT | 55 |
| 9022 | TGGGACCGAGTGACAGTCGC | 54 |
| 9023 | CTGGGACCGAGTGACAGTCG | 53 |
| 9024 | TCTGGGACCGAGTGACAGTC | 52 |
| 9025 | GTCTGGGACCGAGTGACAGT | 51 |
| 9026 | TGTCTGGGACCGAGTGACAG | 50 |
| 9027 | GTGTCTGGGACCGAGTGACA | 49 |
| 9028 | GGTGTCTGGGACCGAGTGAC | 48 |
| 9029 | TGGTGTCTGGGACCGAGTGA | 47 |
| 9030 | CTGGTGTCTGGGACCGAGTG | 46 |
| 9031 | TCTGGTGTCTGGGACCGAGT | 45 |
| 9032 | CTCTGGTGTCTGGGACCGAG | 44 |
| 9033 | GCTCTGGTGTCTGGGACCGA | 43 |
| 9034 | TGCTCTGGTGTCTGGGACCG | 42 |
| 9035 | CGGGGCATGGCCAGCAGCCGCCAGG | 424 |
| 9036 | GGGGCATGGCCAGCAGCCGC | 425 |
| 9037 | GGGCATGGCCAGCAGCCGCC | 426 |
| 9038 | GGCATGGCCAGCAGCCGCCA | 427 |
| 9039 | GCATGGCCAGCAGCCGCCAG | 428 |
| 9040 | CATGGCCAGCAGCCGCCAGG | 429 |
| 9041 | ATGGCCAGCAGCCGCCAGGC | 430 |
| 9042 | TGGCCAGCAGCCGCCAGGCT | 431 |
| 9043 | GGCCAGCAGCCGCCAGGCTC | 432 |
| 9044 | GCCAGCAGCCGCCAGGCTCC | 433 |
| 9045 | CCAGCAGCCGCCAGGCTCCT | 434 |
| 9046 | CAGCAGCCGCCAGGCTCCTC | 435 |
| 9047 | AGCAGCCGCCAGGCTCCTCA | 436 |
| 9048 | GCAGCCGCCAGGCTCCTCAG | 437 |
| 9049 | CAGCCGCCAGGCTCCTCAGG | 438 |
| 9050 | AGCCGCCAGGCTCCTCAGGA | 439 |
| 9051 | GCCGCCAGGCTCCTCAGGAG | 440 |
| 9052 | CCGCCAGGCTCCTCAGGAGT | 441 |
| 9053 | CGCCAGGCTCCTCAGGAGTG | 442 |
| 9054 | ACGGGGCATGGCCAGCAGCC | 423 |
| 9055 | CACGGGGCATGGCCAGCAGC | 422 |
| 9056 | ACACGGGGCATGGCCAGCAG | 421 |
| 9057 | CACACGGGGCATGGCCAGCA | 420 |
| 9058 | GCACACGGGGCATGGCCAGC | 419 |
| 9059 | TGCACACGGGGCATGGCCAG | 418 |
| 9060 | ATGCACACGGGGCATGGCCA | 417 |
| 9061 | CATGCACACGGGGCATGGCC | 416 |
| 9062 | ACATGCACACGGGGCATGGC | 415 |
| 9063 | TACATGCACACGGGGCATGG | 414 |
| 9064 | CTACATGCACACGGGGCATG | 413 |
| 9065 | CCTACATGCACACGGGGCAT | 412 |
| 9066 | GCCTACATGCACACGGGGCA | 411 |
| 9067 | CGCCTACATGCACACGGGGC | 410 |
| 9068 | TCGCCTACATGCACACGGGG | 409 |
| 9069 | ATCGCCTACATGCACACGGG | 408 |
| 9070 | CATCGCCTACATGCACACGG | 407 |
| 9071 | CCATCGCCTACATGCACACG | 406 |
| 9072 | CCCATCGCCTACATGCACAC | 405 |
| 9073 | CCCCATCGCCTACATGCACA | 404 |
| 9074 | TCCCCATCGCCTACATGCAC | 403 |
| 9075 | TTCCCCATCGCCTACATGCA | 402 |
| 9076 | CTTCCCCATCGCCTACATGC | 401 |
| 9077 | ACTTCCCCATCGCCTACATG | 400 |
| 9078 | CACTTCCCCATCGCCTACAT | 399 |
| 9079 | TCACTTCCCCATCGCCTACA | 398 |
| 9080 | CTCACTTCCCCATCGCCTAC | 397 |
| 9081 | ACTCACTTCCCCATCGCCTA | 396 |
| 9082 | CACTCACTTCCCCATCGCCT | 395 |
| 9083 | CCACTCACTTCCCCATCGCC | 394 |
| 9084 | TCCACTCACTTCCCCATCGC | 393 |
| 9085 | CTCCACTCACTTCCCCATCG | 392 |
| 9086 | CGTGTGCCCGATCCGCACGTGGTGT | 563 |
| 9087 | GTGTGCCCGATCCGCACGTG | 564 |
| 9088 | TGTGCCCGATCCGCACGTGG | 565 |
| 9089 | GTGCCCGATCCGCACGTGGT | 566 |
| 9090 | TGCCCGATCCGCACGTGGTG | 567 |
| 9091 | GCCCGATCCGCACGTGGTGT | 568 |
| 9092 | CCCGATCCGCACGTGGTGTT | 569 |
| 9093 | CCGATCCGCACGTGGTGTTT | 570 |
| 9094 | CGATCCGCACGTGGTGTTTT | 571 |
| 9095 | GATCCGCACGTGGTGTTTTC | 572 |
| 9096 | ATCCGCACGTGGTGTTTTCC | 573 |
| 9097 | TCCGCACGTGGTGTTTTCCC | 574 |
| 9098 | CCGCACGTGGTGTTTTCCCA | 575 |
| 9099 | CGCACGTGGTGTTTTCCCAG | 576 |
| 9100 | GCACGTGGTGTTTTCCCAGT | 577 |
| 9101 | CACGTGGTGTTTTCCCAGTG | 578 |
| 9102 | ACGTGGTGTTTTCCCAGTGT | 579 |
| 9103 | CGTGGTGTTTTCCCAGTGTC | 580 |
| 9104 | GCGTGTGCCCGATCCGCACG | 562 |
| 9105 | AGCGTGTGCCCGATCCGCAC | 561 |
| 9106 | CAGCGTGTGCCCGATCCGCA | 560 |
| 9107 | TCAGCGTGTGCCCGATCCGC | 559 |
| 9108 | ATCAGCGTGTGCCCGATCCG | 558 |
| 9109 | CATCAGCGTGTGCCCGATCC | 557 |
| 9110 | GCATCAGCGTGTGCCCGATC | 556 |
| 9111 | AGCATCAGCGTGTGCCCGAT | 555 |
| 9112 | AAGCATCAGCGTGTGCCCGA | 554 |
| 9113 | CAAGCATCAGCGTGTGCCCG | 553 |
| 9114 | GCAAGCATCAGCGTGTGCCC | 552 |
| 9115 | GGCAAGCATCAGCGTGTGCC | 551 |
| 9116 | GGGCAAGCATCAGCGTGTGC | 550 |
| 9117 | AGGGCAAGCATCAGCGTGTG | 549 |
| 9118 | CAGGGCAAGCATCAGCGTGT | 548 |
| 9119 | GCAGGGCAAGCATCAGCGTG | 547 |
| 9120 | AGCAGGGCAAGCATCAGCGT | 546 |
| 9121 | CGACAGGCTGACGGGCCAAGCTTGG | 2344 |
| 9122 | GACAGGCTGACGGGCCAAGC | 2345 |
| 9123 | ACAGGCTGACGGGCCAAGCT | 2346 |
| 9124 | CAGGCTGACGGGCCAAGCTT | 2347 |
| 9125 | AGGCTGACGGGCCAAGCTTG | 2348 |
| 9126 | GGCTGACGGGCCAAGCTTGG | 2349 |
| 9127 | GCTGACGGGCCAAGCTTGGC | 2350 |
| 9128 | CTGACGGGCCAAGCTTGGCG | 2351 |
| 9129 | TGACGGGCCAAGCTTGGCGC | 2352 |
| 9130 | GACGGGCCAAGCTTGGCGCC | 2353 |
| 9131 | ACGGGCCAAGCTTGGCGCCC | 2354 |
| 9132 | CGGGCCAAGCTTGGCGCCCT | 2355 |
| 9133 | GGGCCAAGCTTGGCGCCCTG | 2356 |
| 9134 | GGCCAAGCTTGGCGCCCTGG | 2357 |
| 9135 | GCCAAGCTTGGCGCCCTGGC | 2358 |
| 9136 | CCAAGCTTGGCGCCCTGGCC | 2359 |
| 9137 | CAAGCTTGGCGCCCTGGCCA | 2360 |
| 9138 | AAGCTTGGCGCCCTGGCCAT | 2361 |
| 9139 | AGCTTGGCGCCCTGGCCATC | 2362 |
| 9140 | GCTTGGCGCCCTGGCCATCT | 2363 |
| 9141 | CTTGGCGCCCTGGCCATCTG | 2364 |
| 9142 | TTGGCGCCCTGGCCATCTGC | 2365 |
| 9143 | TGGCGCCCTGGCCATCTGCC | 2366 |
| 9144 | GGCGCCCTGGCCATCTGCCC | 2367 |
| 9145 | GCGCCCTGGCCATCTGCCCT | 2368 |
| 9146 | CGCCCTGGCCATCTGCCCTC | 2369 |
| 9147 | GCGACAGGCTGACGGGCCAA | 2343 |
| 9148 | GGCGACAGGCTGACGGGCCA | 2342 |
| 9149 | AGGCGACAGGCTGACGGGCC | 2341 |
| 9150 | CGGATGGGCAGGGAGGATACCGTTT | 3109 |
| 9151 | CGTGGGCGGCGGCGGCTGCGTGGTG | 3287 |
| 9152 | GTGGGCGGCGGCGGCTGCGT | 3288 |
| 9153 | TGGGCGGCGGCGGCTGCGTG | 3289 |
| 9154 | GGGCGGCGGCGGCTGCGTGG | 3290 |
| 9155 | GGCGGCGGCGGCTGCGTGGT | 3291 |
| 9156 | GCGGCGGCGGCTGCGTGGTG | 3292 |
| 9157 | CGGCGGCGGCTGCGTGGTGG | 3293 |
| 9158 | GGCGGCGGCTGCGTGGTGGT | 3294 |
| 9159 | GCGGCGGCTGCGTGGTGGTG | 3295 |
| 9160 | CGGCGGCTGCGTGGTGGTGG | 3296 |
| 9161 | GGCGGCTGCGTGGTGGTGGC | 3297 |
| 9162 | GCGGCTGCGTGGTGGTGGCG | 3298 |
| 9163 | CGGCTGCGTGGTGGTGGCGG | 3299 |
| 9164 | GGCTGCGTGGTGGTGGCGGG | 3300 |
| 9165 | GCTGCGTGGTGGTGGCGGGC | 3301 |
| 9166 | CTGCGTGGTGGTGGCGGGCG | 3302 |
| 9167 | TGCGTGGTGGTGGCGGGCG | 3303 |
| 9168 | GCGTGGTGGTGGCGGGCG | 3304 |
| 9169 | CGTGGTGGTGGCGGGCG | 3305 |
| 9170 | GTGGTGGTGGCGGGCG | 3306 |
| 9171 | TGGTGGTGGCGGGCG | 3307 |
| 9172 | GCGTGGGCGGCGGCGGCTGC | 3286 |
| 9173 | GGCGTGGGCGGCGGCGGCTG | 3285 |
| 9174 | CGGCGTGGGCGGCGGCGGCT | 3284 |
| 9175 | CCGGCGTGGGCGGCGGCGGC | 3283 |
| 9176 | GCCGGCGTGGGCGGCGGCGG | 3282 |
| 9177 | GGCCGGCGTGGGCGGCGGCG | 3281 |
| 9178 | AGGCCGGCGTGGGCGGCGGC | 3280 |

Hot Zones (Relative upstream location to gene start site)
1-630
3061-3321

### Examples

Genetic Code (5′ Upstream Region)

(SEQ ID NO: 11979)

CGCCCGCCACCACCACGCAGCCGCCGCCGCCCACGCCGGCCTCTGCTGCC
CCCTTCCCCAGCCCTTAGCACAGAGAGGGACACATGCCCCTCCCCCAGCT
GCGTTTTTTTATAGTAGATTTTTAACAAAAAACGGGGAGAAATAATGCAT
TTCTGTGGATACAGTGCCCACCGCCCTCCTCCACTTGGAAACGGTATCCT
CCCTGCCCATCCGTCTGTCTGTCGCCCTTCTCCCGGCCCTCACTAAGCCC
CGGCACTTCTAGTGGTCTCACCTGGAGGCAAGAGGGAGGGGACAGAGGCC
CTGCCACGTCCCGCTGCCTCCTGCTCTCTGGAGGTACTGAGACAGGGTGC
TGATGGGAAGGAGGGGAGCCTTTGGGGGGCCACCCGGGGCCTGGACCTAT
GCAGGGAGGCCACGTCCCACCCCACCTCTTGTTTCTGGGTCCCTGCTCCC
CTTTGGGGGTGTGTGTGTGTGTTTTAATTTTCTTTATGGAAAAATTGACA
AAAAAAAAATAGAGAGAGAGGTATTTAACTGCAATAAACTGGCCCCATGT
GGCCCCCGCCTTGTCTGCTTGTGTGTTTGTCCATCTCAGGAGTGGGGAGG
GGGCCTGGGGTCTGCAGAGCTCCACGAGGCATGGTTCTGCTGTTGTGCAC
ATGGCTGTGCATGGTCCCTGCCAGCTGCACCACCCATTACCCAGTGGTTG
GTTGGATGGATGGAGGAATTAAGGAATGAATGTCCCCTTTGAGGCCCTAG
ACGTGCATGAGGGTGTGGGGAGCTGGGGTCAAGGACATGTCCCATGTTGG
AGGAGAGGCAGGGGTCTCCGTGTCAACAGTTCCTGAAAACACAACCAGCC
CCTGGCCCTGCCCTGCTGGGCCAAAGCCCTCCCCTCTGCACCAGCCAATA
GTGGGGCCTGGCCTTGAGCCCCTCACCCCCAGGGAGGGCAGATGGCCAGG
GCGCCAAGCTTGGCCCGTCAGCCTGTCGCCTTGCACCAAGGCTCTGGCGC
CTGTGCTGTGACCCCTGCCCCTGCTGATGATGAAACCTGTCCTCAGCTGA
GATGCAGCGATGCCTGGTAGGGCTGGGGGCTGCTCCTGTGTCTCCCCAGG
TGAGCACACCCCTATTCACTGGGCCCTGCTTCAGCCTGCAGCACCCTTCA
ACTCCCAGGAGCTGGGCTTGCCACTCTGCTCACCTTGTGGAGCTCCATCT
GCCTTTCCTCCCCAATTCCCCCACTCCCTGCACTCGTCTCTTCCCACAAG
AGCCCTGTCTCCTTTTCCTAGCTATTCCCATCTGAGGCCATCTTTATTCA
TTTAGTTTTTAGAGACAGGGTTTCACTCTCACCCAGGCTGGGGTGCAGTG
GCACACAATCACGGCTCACTGCAGCCTTGACCAACTACAGGTGCGTAGCA
CCACAGCCAAGTTTTTGTATAGATGGGGTCTCGCTTTGTTACCCAGGCTG
TGACAAGAGGAGCCTCCCACGTGGTGTGGATGAGGAGGCAGATGGCAGGG
CCTGTGCATTTCTGTGCTTGAGTGGGCCTTGAAAGTGGTTCAGCAACCAG
GAAGAAGTGTTCATTCCTCGACAACAACATCCCCGGGCTCTGGTGACTTG
GCTGACACTGGATGGCCCTGGAATGAAAAAGGCAAAGAGGCAAAATGTGC
AAGGGCCCATCTGGAACCAAGGTTTGTTGATCCCCTGGGCCGTGTGCACC
CTGAGCTGGGCCTGGTAGTGGAAAGGAATGAAGGCACTGCAGTCAGGCAG
CCTGGGTTCATCCCCCAGCTAGTGGTGTCCTAAGGAACCGGCTCCCCAAA
AACATCCCTGGCTTGTAGTGCTTGCCAATTTCTGGGTGTCAAGACTCCCA
CTGCTGCTGATTTCAGGATACCAGCATGATGCCACTGAATGCAGAGTTTC
GAGATGTGCATGGTCTGCTATGTTGAGCCAGGTCTAGCATACCGCTGTGC
CCTGCTGTGTTTTAGGGGAGATGGGGAAACCTGGTGGGTAAGAGCAAAAG
CCCTGGAGTCAGGCTGTCCAGGCTAGAATCTCAGCTCTGCCTCTGGCTGA
GCAAGCTTGGGCCATGCCCTGATCTCTGCCTTCAGTGCCTTTTCTGTAAA
GTGAAGGAAATGAGTGTCCGACGGGGAGGAGGTTCCTAAAAGGGAGCAGG
GTCTGGGGAGCCCAGGCCTCTGGGGTTGGGTGACTGAGAAGGCAGCCCCT
GAATACAGAGCAGAGCTGAAGGTGGGGCAGTAAGTGCTGCTGGGAGAACA
GGCAGCACAGGCTGAGTTGGTGCAGAAGTGAGTCAACATATGTGCCATCG
TATAAAATGTACTCATCGGACTGTAGATGTTAGCTATTACTATTACTGCT
ATTTTATGTTTTATAGACAGGGTCTCACTCTGTCACCCAGGCTGGAGTGC
AGTCACACAATCATAGCTCACTGCAACCTCAGCCTCCTGGGCTTAAGCGA
TCTGCCTCAGCCTCCCAAGTAGCTGGGACTACAGATGTGTGCCACCACGC
CTGGCTAAATTTGTTTAAAATTTTTTTTGTAGAGATGGGGTCTCCCTATG
TTGCCCAGGCTAGTCTTGAACTTCTGGGCTCAAGCGACCCTCCTGCCTTG
GCCTCCCAAATTGCTGGGATTACAGGCATAAGCCACTGTGCTGGGCCATA
TTACTGCTGTCATTTATGGCCAAAAGTTTGCTCAAACATTTTCCAGTTAC
CAGAGCCACATCTCAAGGGTCTGACACTGGGAAAACACCACGTGCGGATC
GGGCACACGCTGATGCTTGCCCTGCTCAGGGCTATCTAGTGTTCCCTGCC
AGAACCTATGCACGTGTGGTGAGAGCTTAAAGCAATGGATGCTTCCCCCA
ACATGCCAGACACTCCTGAGGAGCCTGGCGGCTGCTGGCCATGCCCCGTG
TGCATGTAGGCGATGGGGAAGTGAGTGGAGGAGAGCGGAACCTTGATTCT
GCTCATCAAACTGCTTAACCGCTGAAGCAAAAGGGGGAACTTTTTTCCCG
ATCAGCAGAATGACATCGTGATGGGGAAAGGGCTCCCCAGATGGCTGGTG
AGCAGTGTGTGTCTGTGACCCCGTCTGCCCCACCCCCTGAACACACCTCT
GCCGGCTGAGGGTGACACAACCCTGTTCCCTGTCGCTCTGTTCCCGCTTA
TCTCTCCCGCCTTTTCGGCGCCACCACCTTCTTGGAAATGAGACAGAGCA
AAGGGGAGGGGGCTCAGACCACCGCCTCCCCTGGCAGGCCCCATAAAAGC
GACTGTCACTCGGTCCCAGACACCAGAGCAAGCTCAAGACCCAGCAGTGG
GACAGCCAGACAGACGGCACGATG

[0445] HBV

[0446] Hepatitis B is an infectious inflammatory disease of the liver caused by the hepatitis B virus (HBV). About ⅓ of the world population is believed to be infected, including 350 million who are chronic carriers. Acutely symptoms include liver inflammation, vomiting and jaundice, while chronic hepatitis B is implicated in cirrhosis and liver cancer. HBV is a DNA virus that has a circular genome of partially double-stranded DNA (Zuckerman A. J. 1996 in Baron S, et al. Baron's Medical Microbiology (4th Ed)) with a full length strand with 3020-3320 nucleotides and a short-length strand of 1700-2800 nucleotides for the short length-strand (Kay A and Zoulim F. 2007 Virus research 127 (2): 164-176). HBV uses reverse transcription to replicate: virus gains entry into the cell by endocytosis, multiplies via RNA made by a host enzyme, then reversed transcribed into viral genomic DNA. The partially double stranded viral DNA is rendered fully double stranded when transformed into covalently closed circular DNA (cccDNA). cccDNA serves as a template for transcription of four viral mRNAs encoding viral proteins called C, X, P and S critical of virus infection and replication. HBV core protein is coded for by gene C (HBcAg); its DNA polymerase is encoded by gene P; the surface antigen (HBsAg) is encoded by the S gene. HBx protein is encoded by the X gene and is believed to drive cccDNA transcription and stimulates genes to promote cell growth associated with liver cancer and the persistence of HBV.

[0447] Hepatitis B Virus (1-3215 [NCBI Reference Sequence: NC_{—}003977]; strand: negative)

Targeted Sequences

| | | | Relative |
|---|---|---|---|
| | | | upstream |
| | | | location |
| | | | to |
| Sequence | Design | | start |
| ID No: | ID | Sequence (5′-3′) | site |
| 9179 | | CCGATTGGTGGAGGCAGGAGGAGG | 72 |
| 9180 | | CGAGATTGAGATCTTCTGCGACGCGG | 780 |
| 9235 | | CGCGGCGATTGAGACCTTCGTC | 801 |
| 9290 | | CGTCTGCGAGGCGAGGGAGTTCTTCT | 819 |
| 9345 | | CGATACAGAGCAGAGGCGGTGT | 1200 |
| 9346 | | CGCGTAAAGAGAGGTGCGCCCCGTGG | 1674 |
| 9360 | | ACGGGTCGTCCGCGGGATTCAGCGCCG | 1754 |
| 9409 | | CGTCCCGCGCAGGATCCAGTTGG | 1800 |
| 9432 | | CGGCTGCGAGCAAAACAAGCTGCTAG | 1909 |
| 9468 | | CGCATGCGCCGATGGCCTATGGCCAA | 1978 |
| 9496 | | CGCCGCAGACACATCCAGCGATA | 2826 |
| 9525 | | GCTCCAGACCGGCTGCGA | 1900 |
| 9561 | | CGTCCATCGCAGGATCCAGTTGG | 1800 |
| 9562 | | CGCCGCAGACACATCCAGCGATA | 2826 |
| 9591 | | CAAATGGCACTAGTAAACTGAG | 2524 |
| 9592 | | GAGATTGAGATCTGCGGCGACGCGG | 780 |
| 9593 | | CGACGCGGCGATTGAGATCTTCGTCTG | 801 |
| 9594 | | AGGGGTCGTCCGCGGGATTCAGCGCCG | 1754 |

Target Shift Sequences

| | | Relative |
|---|---|---|
| | | upstream |
| Sequence | | location |
| ID No: | Sequence (5′-3′) | to start site |
| 9179 | CCGATTGGTGGAGGCAGGAGGAGG | 72 |
| 9180 | CGAGATTGAGATCTTCTGCGACGCGG | 780 |
| 9181 | GAGATTGAGATCTTCTGCGA | 781 |
| 9182 | AGATTGAGATCTTCTGCGAC | 782 |
| 9183 | GATTGAGATCTTCTGCGACG | 783 |
| 9184 | ATTGAGATCTTCTGCGACGC | 784 |
| 9185 | TTGAGATCTTCTGCGACGCG | 785 |
| 9186 | TGAGATCTTCTGCGACGCGG | 786 |
| 9187 | GAGATCTTCTGCGACGCGGC | 787 |
| 9188 | AGATCTTCTGCGACGCGGCG | 788 |
| 9189 | GATCTTCTGCGACGCGGCGA | 789 |
| 9190 | ATCTTCTGCGACGCGGCGAT | 790 |
| 9191 | TCTTCTGCGACGCGGCGATT | 791 |
| 9192 | CTTCTGCGACGCGGCGATTG | 792 |
| 9193 | TTCTGCGACGCGGCGATTGA | 793 |
| 9194 | TCTGCGACGCGGCGATTGAG | 794 |
| 9195 | CTGCGACGCGGCGATTGAGA | 795 |
| 9196 | TGCGACGCGGCGATTGAGAC | 796 |
| 9197 | GCGACGCGGCGATTGAGACC | 797 |
| 9198 | CGACGCGGCGATTGAGACCT | 798 |
| 9199 | GACGCGGCGATTGAGACCTT | 799 |
| 9200 | ACGCGGCGATTGAGACCTTC | 800 |
| 9201 | CGCGGCGATTGAGACCTTCG | 801 |
| 9202 | GCGGCGATTGAGACCTTCGT | 802 |
| 9203 | CGGCGATTGAGACCTTCGTC | 803 |
| 9204 | GGCGATTGAGACCTTCGTCT | 804 |
| 9205 | GCGATTGAGACCTTCGTCTG | 805 |
| 9206 | CGATTGAGACCTTCGTCTGC | 806 |
| 9207 | GATTGAGACCTTCGTCTGCG | 807 |
| 9208 | ATTGAGACCTTCGTCTGCGA | 808 |
| 9209 | TTGAGACCTTCGTCTGCGAG | 809 |
| 9210 | TGAGACCTTCGTCTGCGAGG | 810 |
| 9211 | GAGACCTTCGTCTGCGAGGC | 811 |
| 9212 | AGACCTTCGTCTGCGAGGCG | 812 |
| 9213 | GACCTTCGTCTGCGAGGCGA | 813 |
| 9214 | ACCTTCGTCTGCGAGGCGAG | 814 |
| 9215 | CCTTCGTCTGCGAGGCGAGG | 815 |
| 9216 | CTTCGTCTGCGAGGCGAGGG | 816 |
| 9217 | TTCGTCTGCGAGGCGAGGGA | 817 |
| 9218 | TCGTCTGCGAGGCGAGGGAG | 818 |
| 9219 | CGTCTGCGAGGCGAGGGAGT | 819 |
| 9220 | GTCTGCGAGGCGAGGGAGTT | 820 |
| 9221 | TCTGCGAGGCGAGGGAGTTC | 821 |
| 9222 | CTGCGAGGCGAGGGAGTTCT | 822 |
| 9223 | TGCGAGGCGAGGGAGTTCTT | 823 |
| 9224 | GCGAGGCGAGGGAGTTCTTC | 824 |
| 9225 | CGAGGCGAGGGAGTTCTTCT | 825 |
| 9226 | GAGGCGAGGGAGTTCTTCTT | 826 |
| 9227 | AGGCGAGGGAGTTCTTCTTC | 827 |
| 9228 | GGCGAGGGAGTTCTTCTTCT | 828 |
| 9229 | GCGAGGGAGTTCTTCTTCTA | 829 |
| 9230 | CGAGGGAGTTCTTCTTCTAG | 830 |
| 9231 | CCGAGATTGAGATCTTCTGC | 779 |
| 9232 | CCCGAGATTGAGATCTTCTG | 778 |
| 9233 | TCCCGAGATTGAGATCTTCT | 777 |
| 9234 | TTCCCGAGATTGAGATCTTC | 776 |
| 9235 | CGCGGCGATTGAGACCTTCGTC | 801 |
| 9236 | GCGGCGATTGAGACCTTCGT | 802 |
| 9237 | CGGCGATTGAGACCTTCGTC | 803 |
| 9238 | GGCGATTGAGACCTTCGTCT | 804 |
| 9239 | GCGATTGAGACCTTCGTCTG | 805 |
| 9240 | CGATTGAGACCTTCGTCTGC | 806 |
| 9241 | GATTGAGACCTTCGTCTGCG | 807 |
| 9242 | ATTGAGACCTTCGTCTGCGA | 808 |
| 9243 | TTGAGACCTTCGTCTGCGAG | 809 |
| 9244 | TGAGACCTTCGTCTGCGAGG | 810 |
| 9245 | GAGACCTTCGTCTGCGAGGC | 811 |
| 9246 | AGACCTTCGTCTGCGAGGCG | 812 |
| 9247 | GACCTTCGTCTGCGAGGCGA | 813 |
| 9248 | ACCTTCGTCTGCGAGGCGAG | 814 |
| 9249 | CCTTCGTCTGCGAGGCGAGG | 815 |
| 9250 | CTTCGTCTGCGAGGCGAGGG | 816 |
| 9251 | TTCGTCTGCGAGGCGAGGGA | 817 |
| 9252 | TCGTCTGCGAGGCGAGGGAG | 818 |
| 9253 | CGTCTGCGAGGCGAGGGAGT | 819 |
| 9254 | GTCTGCGAGGCGAGGGAGTT | 820 |
| 9255 | TCTGCGAGGCGAGGGAGTTC | 821 |
| 9256 | CTGCGAGGCGAGGGAGTTCT | 822 |
| 9257 | TGCGAGGCGAGGGAGTTCTT | 823 |
| 9258 | GCGAGGCGAGGGAGTTCTTC | 824 |
| 9259 | CGAGGCGAGGGAGTTCTTCT | 825 |
| 9260 | GAGGCGAGGGAGTTCTTCTT | 826 |
| 9261 | AGGCGAGGGAGTTCTTCTTC | 827 |
| 9262 | GGCGAGGGAGTTCTTCTTCT | 828 |
| 9263 | GCGAGGGAGTTCTTCTTCTA | 829 |
| 9264 | CGAGGGAGTTCTTCTTCTAG | 830 |
| 9265 | ACGCGGCGATTGAGACCTTC | 800 |
| 9266 | GACGCGGCGATTGAGACCTT | 799 |
| 9267 | CGACGCGGCGATTGAGACCT | 798 |
| 9268 | GCGACGCGGCGATTGAGACC | 797 |
| 9269 | TGCGACGCGGCGATTGAGAC | 796 |
| 9270 | CTGCGACGCGGCGATTGAGA | 795 |
| 9271 | TCTGCGACGCGGCGATTGAG | 794 |
| 9272 | TTCTGCGACGCGGCGATTGA | 793 |
| 9273 | CTTCTGCGACGCGGCGATTG | 792 |
| 9274 | TCTTCTGCGACGCGGCGATT | 791 |
| 9275 | ATCTTCTGCGACGCGGCGAT | 790 |
| 9276 | GATCTTCTGCGACGCGGCGA | 789 |
| 9277 | AGATCTTCTGCGACGCGGCG | 788 |
| 9278 | GAGATCTTCTGCGACGCGGC | 787 |
| 9279 | TGAGATCTTCTGCGACGCGG | 786 |
| 9280 | TTGAGATCTTCTGCGACGCG | 785 |
| 9281 | ATTGAGATCTTCTGCGACGC | 784 |
| 9282 | GATTGAGATCTTCTGCGACG | 783 |
| 9283 | AGATTGAGATCTTCTGCGAC | 782 |
| 9284 | GAGATTGAGATCTTCTGCGA | 781 |
| 9285 | CGAGATTGAGATCTTCTGCG | 780 |
| 9286 | CCGAGATTGAGATCTTCTGC | 779 |
| 9287 | CCCGAGATTGAGATCTTCTG | 778 |
| 9288 | TCCCGAGATTGAGATCTTCT | 777 |
| 9289 | TTCCCGAGATTGAGATCTTC | 776 |
| 9290 | CGTCTGCGAGGCGAGGGAGTTCTTCT | 819 |
| 9291 | GTCTGCGAGGCGAGGGAGTT | 820 |
| 9292 | TCTGCGAGGCGAGGGAGTTC | 821 |
| 9293 | CTGCGAGGCGAGGGAGTTCT | 822 |
| 9294 | TGCGAGGCGAGGGAGTTCTT | 823 |
| 9295 | GCGAGGCGAGGGAGTTCTTC | 824 |
| 9296 | CGAGGCGAGGGAGTTCTTCT | 825 |
| 9297 | GAGGCGAGGGAGTTCTTCTT | 826 |
| 9298 | AGGCGAGGGAGTTCTTCTTC | 827 |
| 9299 | GGCGAGGGAGTTCTTCTTCT | 828 |
| 9300 | GCGAGGGAGTTCTTCTTCTA | 829 |
| 9301 | CGAGGGAGTTCTTCTTCTAG | 830 |
| 9302 | TCGTCTGCGAGGCGAGGGAG | 818 |
| 9303 | TTCGTCTGCGAGGCGAGGGA | 817 |
| 9304 | CTTCGTCTGCGAGGCGAGGG | 816 |
| 9305 | CCTTCGTCTGCGAGGCGAGG | 815 |
| 9306 | ACCTTCGTCTGCGAGGCGAG | 814 |
| 9307 | GACCTTCGTCTGCGAGGCGA | 813 |
| 9308 | AGACCTTCGTCTGCGAGGCG | 812 |
| 9309 | GAGACCTTCGTCTGCGAGGC | 811 |
| 9310 | TGAGACCTTCGTCTGCGAGG | 810 |
| 9311 | TTGAGACCTTCGTCTGCGAG | 809 |
| 9312 | ATTGAGACCTTCGTCTGCGA | 808 |
| 9313 | GATTGAGACCTTCGTCTGCG | 807 |
| 9314 | CGATTGAGACCTTCGTCTGC | 806 |
| 9315 | GCGATTGAGACCTTCGTCTG | 805 |
| 9316 | GGCGATTGAGACCTTCGTCT | 804 |
| 9317 | CGGCGATTGAGACCTTCGTC | 803 |
| 9318 | GCGGCGATTGAGACCTTCGT | 802 |
| 9319 | CGCGGCGATTGAGACCTTCG | 801 |
| 9320 | ACGCGGCGATTGAGACCTTC | 800 |
| 9321 | GACGCGGCGATTGAGACCTT | 799 |
| 9322 | CGACGCGGCGATTGAGACCT | 798 |
| 9323 | GCGACGCGGCGATTGAGACC | 797 |
| 9324 | TGCGACGCGGCGATTGAGAC | 796 |
| 9325 | CTGCGACGCGGCGATTGAGA | 795 |
| 9326 | TCTGCGACGCGGCGATTGAG | 794 |
| 9327 | TTCTGCGACGCGGCGATTGA | 793 |
| 9328 | CTTCTGCGACGCGGCGATTG | 792 |
| 9329 | TCTTCTGCGACGCGGCGATT | 791 |
| 9330 | ATCTTCTGCGACGCGGCGAT | 790 |
| 9331 | GATCTTCTGCGACGCGGCGA | 789 |
| 9332 | AGATCTTCTGCGACGCGGCG | 788 |
| 9333 | GAGATCTTCTGCGACGCGGC | 787 |
| 9334 | TGAGATCTTCTGCGACGCGG | 786 |
| 9335 | TTGAGATCTTCTGCGACGCG | 785 |
| 9336 | ATTGAGATCTTCTGCGACGC | 784 |
| 9337 | GATTGAGATCTTCTGCGACG | 783 |
| 9338 | AGATTGAGATCTTCTGCGAC | 782 |
| 9339 | GAGATTGAGATCTTCTGCGA | 781 |
| 9340 | CGAGATTGAGATCTTCTGCG | 780 |
| 9341 | CCGAGATTGAGATCTTCTGC | 779 |
| 9342 | CCCGAGATTGAGATCTTCTG | 778 |
| 9343 | TCCCGAGATTGAGATCTTCT | 777 |
| 9344 | TTCCCGAGATTGAGATCTTC | 776 |
| 9345 | CGATACAGAGCAGAGGCGGTGT | 1200 |
| 9346 | CGCGTAAAGAGAGGTGCGCCCCGTGG | 1674 |
| 9347 | GCGTAAAGAGAGGTGCGCCC | 1675 |
| 9348 | CGTAAAGAGAGGTGCGCCCC | 1676 |
| 9349 | GTAAAGAGAGGTGCGCCCCG | 1677 |
| 9350 | TAAAGAGAGGTGCGCCCCGT | 1678 |
| 9351 | AAAGAGAGGTGCGCCCCGTG | 1679 |
| 9352 | AAGAGAGGTGCGCCCCGTGG | 1680 |
| 9353 | AGAGAGGTGCGCCCCGTGGT | 1681 |
| 9354 | GAGAGGTGCGCCCCGTGGTC | 1682 |
| 9355 | AGAGGTGCGCCCCGTGGTCG | 1683 |
| 9356 | GAGGTGCGCCCCGTGGTCGG | 1684 |
| 9357 | AGGTGCGCCCCGTGGTCGGC | 1685 |
| 9358 | GGTGCGCCCCGTGGTCGGCC | 1686 |
| 9359 | CCGCGTAAAGAGAGGTGCGC | 1673 |
| 9360 | ACGGGTCGTCCGCGGGATTCAGCGCCG | 1754 |
| 9361 | CGGGTCGTCCGCGGGATTCA | 1755 |
| 9362 | GGGTCGTCCGCGGGATTCAG | 1756 |
| 9363 | GGTCGTCCGCGGGATTCAGC | 1757 |
| 9364 | GTCGTCCGCGGGATTCAGCG | 1758 |
| 9365 | TCGTCCGCGGGATTCAGCGC | 1759 |
| 9366 | CGTCCGCGGGATTCAGCGCC | 1760 |
| 9367 | GTCCGCGGGATTCAGCGCCG | 1761 |
| 9368 | TCCGCGGGATTCAGCGCCGA | 1762 |
| 9369 | CCGCGGGATTCAGCGCCGAC | 1763 |
| 9370 | CGCGGGATTCAGCGCCGACG | 1764 |
| 9371 | GCGGGATTCAGCGCCGACGG | 1765 |
| 9372 | CGGGATTCAGCGCCGACGGG | 1766 |
| 9373 | GGGATTCAGCGCCGACGGGA | 1767 |
| 9374 | GGATTCAGCGCCGACGGGAC | 1768 |
| 9375 | GATTCAGCGCCGACGGGACG | 1769 |
| 9376 | ATTCAGCGCCGACGGGACGT | 1770 |
| 9377 | TTCAGCGCCGACGGGACGTA | 1771 |
| 9378 | TCAGCGCCGACGGGACGTAG | 1772 |
| 9379 | CAGCGCCGACGGGACGTAGA | 1773 |
| 9380 | AGCGCCGACGGGACGTAGAC | 1774 |
| 9381 | GCGCCGACGGGACGTAGACA | 1775 |
| 9382 | CGCCGACGGGACGTAGACAA | 1776 |
| 9383 | GACGGGTCGTCCGCGGGATT | 1753 |
| 9384 | AGACGGGTCGTCCGCGGGAT | 1752 |
| 9385 | GAGACGGGTCGTCCGCGGGA | 1751 |
| 9386 | CGAGACGGGTCGTCCGCGGG | 1750 |
| 9387 | CCGAGACGGGTCGTCCGCGG | 1749 |
| 9388 | CCCGAGACGGGTCGTCCGCG | 1748 |
| 9389 | CCCCGAGACGGGTCGTCCGC | 1747 |
| 9390 | GCCCCGAGACGGGTCGTCCG | 1746 |
| 9391 | GGCCCCGAGACGGGTCGTCC | 1745 |
| 9392 | CGGCCCCGAGACGGGTCGTC | 1744 |
| 9393 | ACGGCCCCGAGACGGGTCGT | 1743 |
| 9394 | AACGGCCCCGAGACGGGTCG | 1742 |
| 9395 | AAACGGCCCCGAGACGGGTC | 1741 |
| 9396 | CAAACGGCCCCGAGACGGGT | 1740 |
| 9397 | CCAAACGGCCCCGAGACGGG | 1739 |
| 9398 | CCCAAACGGCCCCGAGACGG | 1738 |
| 9399 | GCCCAAACGGCCCCGAGACG | 1737 |
| 9400 | GGCCCAAACGGCCCCGAGAC | 1736 |
| 9401 | AGGCCCAAACGGCCCCGAGA | 1735 |
| 9402 | GAGGCCCAAACGGCCCCGAG | 1734 |
| 9403 | AGAGGCCCAAACGGCCCCGA | 1733 |
| 9404 | TAGAGGCCCAAACGGCCCCG | 1732 |
| 9405 | GTAGAGGCCCAAACGGCCCC | 1731 |
| 9406 | GGTAGAGGCCCAAACGGCCC | 1730 |
| 9407 | CGGTAGAGGCCCAAACGGCC | 1729 |
| 9408 | ACGGTAGAGGCCCAAACGGC | 1728 |
| 9409 | CGTCCCGCGCAGGATCCAGTTGG | 1800 |
| 9410 | GTCCCGCGCAGGATCCAGTT | 1801 |
| 9411 | TCCCGCGCAGGATCCAGTTG | 1802 |
| 9412 | CCCGCGCAGGATCCAGTTGG | 1803 |
| 9413 | CCGCGCAGGATCCAGTTGGC | 1804 |
| 9414 | CGCGCAGGATCCAGTTGGCA | 1805 |
| 9415 | GCGCAGGATCCAGTTGGCAG | 1806 |
| 9416 | CGCAGGATCCAGTTGGCAGC | 1807 |
| 9417 | ACGTCCCGCGCAGGATCCAG | 1799 |
| 9418 | GACGTCCCGCGCAGGATCCA | 1798 |
| 9419 | GGACGTCCCGCGCAGGATCC | 1797 |
| 9420 | AGGACGTCCCGCGCAGGATC | 1796 |
| 9421 | AAGGACGTCCCGCGCAGGAT | 1795 |
| 9422 | AAAGGACGTCCCGCGCAGGA | 1794 |
| 9423 | CAAAGGACGTCCCGCGCAGG | 1793 |
| 9424 | ACAAAGGACGTCCCGCGCAG | 1792 |
| 9425 | GACAAAGGACGTCCCGCGCA | 1791 |
| 9426 | AGACAAAGGACGTCCCGCGC | 1790 |
| 9427 | TAGACAAAGGACGTCCCGCG | 1789 |
| 9428 | GTAGACAAAGGACGTCCCGC | 1788 |
| 9429 | CGTAGACAAAGGACGTCCCG | 1787 |
| 9430 | ACGTAGACAAAGGACGTCCC | 1786 |
| 9431 | GACGTAGACAAAGGACGTCC | 1785 |
| 9432 | CGGCTGCGAGCAAAACAAGCTGCTAG | 1909 |
| 9433 | GGCTGCGAGCAAAACAAGCT | 1910 |
| 9434 | GCTGCGAGCAAAACAAGCTG | 1911 |
| 9435 | CTGCGAGCAAAACAAGCTGC | 1912 |
| 9436 | TGCGAGCAAAACAAGCTGCT | 1913 |
| 9437 | GCGAGCAAAACAAGCTGCTA | 1914 |
| 9438 | CGAGCAAAACAAGCTGCTAG | 1915 |
| 9439 | CCGGCTGCGAGCAAAACAAG | 1908 |
| 9440 | ACCGGCTGCGAGCAAAACAA | 1907 |
| 9441 | GACCGGCTGCGAGCAAAACA | 1906 |
| 9442 | AGACCGGCTGCGAGCAAAAC | 1905 |
| 9443 | CAGACCGGCTGCGAGCAAAA | 1904 |
| 9444 | CCAGACCGGCTGCGAGCAAA | 1903 |
| 9445 | TCCAGACCGGCTGCGAGCAA | 1902 |
| 9446 | CTCCAGACCGGCTGCGAGCA | 1901 |
| 9447 | GCTCCAGACCGGCTGCGAGC | 1900 |
| 9448 | CGCTCCAGACCGGCTGCGAG | 1899 |
| 9449 | TCGCTCCAGACCGGCTGCGA | 1898 |
| 9450 | TTCGCTCCAGACCGGCTGCG | 1897 |
| 9451 | TTTCGCTCCAGACCGGCTGC | 1896 |
| 9452 | GTTTCGCTCCAGACCGGCTG | 1895 |
| 9453 | AGTTTCGCTCCAGACCGGCT | 1894 |
| 9454 | AAGTTTCGCTCCAGACCGGC | 1893 |
| 9455 | TAAGTTTCGCTCCAGACCGG | 1892 |
| 9456 | ATAAGTTTCGCTCCAGACCG | 1891 |
| 9457 | GATAAGTTTCGCTCCAGACC | 1890 |
| 9458 | CGATAAGTTTCGCTCCAGAC | 1889 |
| 9459 | CCGATAAGTTTCGCTCCAGA | 1888 |
| 9460 | TCCGATAAGTTTCGCTCCAG | 1887 |
| 9461 | TTCCGATAAGTTTCGCTCCA | 1886 |
| 9462 | GTTCCGATAAGTTTCGCTCC | 1885 |
| 9463 | GGTTCCGATAAGTTTCGCTC | 1884 |
| 9464 | CGGTTCCGATAAGTTTCGCT | 1883 |
| 9465 | TCGGTTCCGATAAGTTTCGC | 1882 |
| 9466 | GTCGGTTCCGATAAGTTTCG | 1881 |
| 9467 | TGTCGGTTCCGATAAGTTTC | 1880 |
| 9468 | CGCATGCGCCGATGGCCTATGGCCAA | 1978 |
| 9469 | GCATGCGCCGATGGCCTATG | 1979 |
| 9470 | CATGCGCCGATGGCCTATGG | 1980 |
| 9471 | ATGCGCCGATGGCCTATGGC | 1981 |
| 9472 | TGCGCCGATGGCCTATGGCC | 1982 |
| 9473 | GCGCCGATGGCCTATGGCCA | 1983 |
| 9474 | CGCCGATGGCCTATGGCCAA | 1984 |
| 9475 | GCCGATGGCCTATGGCCAAG | 1985 |
| 9476 | CCGATGGCCTATGGCCAAGC | 1986 |
| 9477 | CGATGGCCTATGGCCAAGCC | 1987 |
| 9478 | ACGCATGCGCCGATGGCCTA | 1977 |
| 9479 | CACGCATGCGCCGATGGCCT | 1976 |
| 9480 | CCACGCATGCGCCGATGGCC | 1975 |
| 9481 | TCCACGCATGCGCCGATGGC | 1974 |
| 9482 | TTCCACGCATGCGCCGATGG | 1973 |
| 9483 | GTTCCACGCATGCGCCGATG | 1972 |
| 9484 | GGTTCCACGCATGCGCCGAT | 1971 |
| 9485 | AGGTTCCACGCATGCGCCGA | 1970 |
| 9486 | AAGGTTCCACGCATGCGCCG | 1969 |
| 9487 | AAAGGTTCCACGCATGCGCC | 1968 |
| 9488 | CAAAGGTTCCACGCATGCGC | 1967 |
| 9489 | ACAAAGGTTCCACGCATGCG | 1966 |
| 9490 | CACAAAGGTTCCACGCATGC | 1965 |
| 9491 | CCACAAAGGTTCCACGCATG | 1964 |
| 9492 | GCCACAAAGGTTCCACGCAT | 1963 |
| 9493 | AGCCACAAAGGTTCCACGCA | 1962 |
| 9494 | GAGCCACAAAGGTTCCACGC | 1961 |
| 9495 | GGAGCCACAAAGGTTCCACG | 1960 |
| 9496 | CGCCGCAGACACATCCAGCGATA | 2826 |
| 9497 | GCCGCAGACACATCCAGCGA | 2827 |
| 9498 | CCGCAGACACATCCAGCGAT | 2828 |
| 9499 | CGCAGACACATCCAGCGATA | 2829 |
| 9500 | GCAGACACATCCAGCGATAG | 2830 |
| 9501 | CAGACACATCCAGCGATAGC | 2831 |
| 9502 | AGACACATCCAGCGATAGCC | 2832 |
| 9503 | GACACATCCAGCGATAGCCA | 2833 |
| 9504 | ACACATCCAGCGATAGCCAG | 2834 |
| 9505 | CACATCCAGCGATAGCCAGG | 2835 |
| 9506 | ACATCCAGCGATAGCCAGGA | 2836 |
| 9507 | CATCCAGCGATAGCCAGGAC | 2837 |
| 9508 | ATCCAGCGATAGCCAGGACA | 2838 |
| 9509 | TCCAGCGATAGCCAGGACAA | 2839 |
| 9510 | CCAGCGATAGCCAGGACAAG | 2840 |
| 9511 | CAGCGATAGCCAGGACAAGT | 2841 |
| 9512 | AGCGATAGCCAGGACAAGTT | 2842 |
| 9513 | GCGATAGCCAGGACAAGTTG | 2843 |
| 9514 | CGATAGCCAGGACAAGTTGG | 2844 |
| 9515 | ACGCCGCAGACACATCCAGC | 2825 |
| 9516 | AACGCCGCAGACACATCCAG | 2824 |
| 9517 | AAACGCCGCAGACACATCCA | 2823 |
| 9518 | AAAACGCCGCAGACACATCC | 2822 |
| 9519 | TAAAACGCCGCAGACACATC | 2821 |
| 9520 | ATAAAACGCCGCAGACACAT | 2820 |
| 9521 | GATAAAACGCCGCAGACACA | 2819 |
| 9522 | TGATAAAACGCCGCAGACAC | 2818 |
| 9523 | ATGATAAAACGCCGCAGACA | 2817 |
| 9524 | TATGATAAAACGCCGCAGAC | 2816 |
| 9525 | GCTCCAGACCGGCTGCGA | 1900 |
| 9526 | CTCCAGACCGGCTGCGAGCA | 1901 |
| 9527 | TCCAGACCGGCTGCGAGCAA | 1902 |
| 9528 | CCAGACCGGCTGCGAGCAAA | 1903 |
| 9529 | CAGACCGGCTGCGAGCAAAA | 1904 |
| 9530 | AGACCGGCTGCGAGCAAAAC | 1905 |
| 9531 | GACCGGCTGCGAGCAAAACA | 1906 |
| 9532 | ACCGGCTGCGAGCAAAACAA | 1907 |
| 9533 | CCGGCTGCGAGCAAAACAAG | 1908 |
| 9534 | CGGCTGCGAGCAAAACAAGC | 1909 |
| 9535 | GGCTGCGAGCAAAACAAGCT | 1910 |
| 9536 | GCTGCGAGCAAAACAAGCTG | 1911 |
| 9537 | CTGCGAGCAAAACAAGCTGC | 1912 |
| 9538 | TGCGAGCAAAACAAGCTGCT | 1913 |
| 9539 | GCGAGCAAAACAAGCTGCTA | 1914 |
| 9540 | CGAGCAAAACAAGCTGCTAG | 1915 |
| 9541 | CGCTCCAGACCGGCTGCGAG | 1899 |
| 9542 | TCGCTCCAGACCGGCTGCGA | 1898 |
| 9543 | TTCGCTCCAGACCGGCTGCG | 1897 |
| 9544 | TTTCGCTCCAGACCGGCTGC | 1896 |
| 9545 | GTTTCGCTCCAGACCGGCTG | 1895 |
| 9546 | AGTTTCGCTCCAGACCGGCT | 1894 |
| 9547 | AAGTTTCGCTCCAGACCGGC | 1893 |
| 9548 | TAAGTTTCGCTCCAGACCGG | 1892 |
| 9549 | ATAAGTTTCGCTCCAGACCG | 1891 |
| 9550 | GATAAGTTTCGCTCCAGACC | 1890 |
| 9551 | CGATAAGTTTCGCTCCAGAC | 1889 |
| 9552 | CCGATAAGTTTCGCTCCAGA | 1888 |
| 9553 | TCCGATAAGTTTCGCTCCAG | 1887 |
| 9554 | TTCCGATAAGTTTCGCTCCA | 1886 |
| 9555 | GTTCCGATAAGTTTCGCTCC | 1885 |
| 9556 | GGTTCCGATAAGTTTCGCTC | 1884 |
| 9557 | CGGTTCCGATAAGTTTCGCT | 1883 |
| 9558 | TCGGTTCCGATAAGTTTCGC | 1882 |
| 9559 | GTCGGTTCCGATAAGTTTCG | 1881 |
| 9560 | TGTCGGTTCCGATAAGTTTC | 1880 |
| 9561 | CGTCCATCGCAGGATCCAGTTGG | 1800 |
| 9562 | CGCCGCAGACACATCCAGCGATA | 2826 |
| 9563 | GCCGCAGACACATCCAGCGA | 2827 |
| 9564 | CCGCAGACACATCCAGCGAT | 2828 |
| 9565 | CGCAGACACATCCAGCGATA | 2829 |
| 9566 | GCAGACACATCCAGCGATAG | 2830 |
| 9567 | CAGACACATCCAGCGATAGC | 2831 |
| 9568 | AGACACATCCAGCGATAGCC | 2832 |
| 9569 | GACACATCCAGCGATAGCCA | 2833 |
| 9570 | ACACATCCAGCGATAGCCAG | 2834 |
| 9571 | CACATCCAGCGATAGCCAGG | 2835 |
| 9572 | ACATCCAGCGATAGCCAGGA | 2836 |
| 9573 | CATCCAGCGATAGCCAGGAC | 2837 |
| 9574 | ATCCAGCGATAGCCAGGACA | 2838 |
| 9575 | TCCAGCGATAGCCAGGACAA | 2839 |
| 9576 | CCAGCGATAGCCAGGACAAG | 2840 |
| 9577 | CAGCGATAGCCAGGACAAGT | 2841 |
| 9578 | AGCGATAGCCAGGACAAGTT | 2842 |
| 9579 | GCGATAGCCAGGACAAGTTG | 2843 |
| 9580 | CGATAGCCAGGACAAGTTGG | 2844 |
| 9581 | ACGCCGCAGACACATCCAGC | 2825 |
| 9582 | AACGCCGCAGACACATCCAG | 2824 |
| 9583 | AAACGCCGCAGACACATCCA | 2823 |
| 9584 | AAAACGCCGCAGACACATCC | 2822 |
| 9585 | TAAAACGCCGCAGACACATC | 2821 |
| 9586 | ATAAAACGCCGCAGACACAT | 2820 |
| 9587 | GATAAAACGCCGCAGACACA | 2819 |
| 9588 | TGATAAAACGCCGCAGACAC | 2818 |
| 9589 | ATGATAAAACGCCGCAGACA | 2817 |
| 9590 | TATGATAAAACGCCGCAGAC | 2816 |
| 9591 | CAAATGGCACTAGTAAACTGAG | 2524 |
| 9592 | GAGATTGAGATCTGCGGCGACGCGG | 780 |
| 9593 | CGACGCGGCGATTGAGATCTTCGTCTG | 801 |
| 9594 | AGGGGTCGTCCGCGGGATTCAGCGCCG | 1754 |

Hot Zones (Relative upstream location to gene start site)
245-425
785-965
1145-1235
1505-2135
2585-3125

### Examples

Genetic Code (5′ Upstream Region)

(SEQ ID NO: 11980)

CTCCACAACATTCCACCAAGCTCTGCTAGATCCCAGAGTGAGGGGCCTAT
ATTTTCCTGCTGGTGGCTCCAGTTCCGGAACAGTAAACCCTGTTCCGACT
ACTGCCTCACCCATATCGTCAATCTTCTCGAGGACTGGGGACCCTGCACC
GAACATGGAGAGCACAACATCAGGATTCCTAGGACCCCTGCTCGTGTTAC
AGGCGGGGTTTTTCTTGTTGACAAGAATCCTCACAATACCACAGAGTCTA
GACTCGTGGTGGACTTCTCTCAATTTTCTAGGGGGAGCACCCACGTGTCC
TGGCCAAAATTCGCAGTCCCCAACCTCCAATCACTCACCAACCTCTTGTC
CTCCAACTTGTCCTGGCTATCGCTGGATGTGTCTGCGGCGTTTTATCATA
TTCCTCTTCATCCTGCTGCTATGCCTCATCTTCTTGTTGGTTCTTCTGGA
CTACCAAGGTATGTTGCCCGTTTGTCCTCTACTTCCAGGAACATCAACTA
CCAGCACGGGACCATGCAGAACCTGCACGATTCCTGCTCAAGGAACCTCT
ATGTTTCCCTCTTGTTGCTGTACAAAACCTTCGGACGGAAACTGCACTTG
TATTCCCATCCCATCATCCTGGGCTTTCGCAAGATTCCTATGGGAGTGGG
CCTCAGTCCGTTTCTCCTGGCTCAGTTTACTAGTGCCATTTGTTCAGTGG
TTCGTAGGGCTTTCCCCCACTGTTTGGCTTTCAGCTATATGGATGATGTG
GTATTGGGGGCCAAGTCTGTACAACATCTTGAGTCCCTTTTTACCTCTAT
TACCAATTTTCTTTTGTCTTTGGGTATACATTTGAACCCTAATAAAACCA
AACGTTGGGGCTACTCCCTTAACTTCATGGGATATGTAATTGGAAGTTGG
GGTACTTTACCGCAGGAACATATTGTACAAAAACTCAAGCAATGTTTTCG
AAAATTGCCTGTAAATAGACCTATTGATTGGAAAGTATGTCAAAGAATTG
TGGGTCTTTTGGGCTTTGCTGCCCCTTTTACACAATGTGGCTATCCTGCC
TTGATGCCTTTATATGCATGTATACAATCTAAGCAGGCTTTCACTTTCTC
GCCAACTTACAAGGCCTTTCTGTGTAAACAATATCTAAACCTTTACCCCG
TTGCCCGGCAACGGTCAGGTCTCTGCCAAGTGTTTGCTGACGCAACCCCC
ACGGGTTGGGGCTTGGCCATAGGCCATCGGCGCATGCGTGGAACCTTTGT
GGCTCCTCTGCCGATCCATACTGCGGAACTCCTAGCAGCTTGTTTTGCTC
GCAGCCGGTCTGGAGCGAAACTTATCGGAACCGACAACTCAGTTGTCCTC
TCTCGGAAATACACCTCCTTTCCATGGCTGCTAGGCTGTGCTGCCAACTG
GATCCTGCGCGGGACGTCCTTTGTCTACGTCCCGTCGGCGCTGAATCCCG
CGGACGACCCGTCTCGGGGCCGTTTGGGCCTCTACCGTCCCCTTCTTCAT
CTGCCGTTCCGGCCGACCACGGGGCGCACCTCTCTTTACGCGGTCTCCCC
GTCTGTGCCTTCTCATCTGCCGGACCGTGTGCACTTCGCTTCACCTCTGC
ACGTAGCATGGAGACCACCGTGAACGCCCACCAGGTCTTGCCCAAGGTCT
TACACAAGAGGACTCTTGGACTCTCAGCAATGTCAACGACCGACCTTGAG
GCATACTTCAAAGACTGTTTGTTTAAAGACTGGGAGGAGTTGGGGGAGGA
GATTAGGTTAAAGGTCTTTGTACTAGGAGGCTGTAGGCATAAATTGGTCT
GTTCACCAGCACCATGCAACTTTTTCCCCTCTGCCTAATCATCTCATGTT
CATGTCCTACTGTTCAAGCCTCCAAGCTGTGCCTTGGGTGGCTTTGGGGC
ATGGACATTGACCCGTATAAAGAATTTGGAGCTTCTGTGGAGTTACTCTC
TTTTTTGCCTTCTGACTTCTTTCCTTCTATTCGAGATCTCCTCGACACCG
CCTCTGCTCTGTATCGGGAGGCCTTAGAGTCTCCGGAACATTGTTCACCT
CACCATACAGCACTCAGGCAAGCTATTCTGTGTTGGGGTGAGTTGATGAA
TCTGGCCACCTGGGTGGGAAGTAATTTGGAAGACCCAGCATCCAGGGAAT
TAGTAGTCAGCTATGTCAATGTTAATATGGGCCTAAAAATTAGACAACTA
TTGTGGTTTCACATTTCCTGCCTTACTTTTGGAAGAGAAACTGTCCTTGA
GTATTTGGTGTCTTTTGGAGTGTGGATTCGCACTCCTCCCGCTTACAGAC
CACCAAATGCCCCTATCTTATCAACACTTCCGGAAACTACTGTTGTTAGA
CGACGAGGCAGGTCCCCTAGAAGAAGAACTCCCTCGCCTCGCAGACGAAG
GTCTCAATCGCCGCGTCGCAGAAGATCTCAATCTCGGGAATCTCAATGTT
AGTATCCCTTGGACTCATAAGGTGGGAAACTTTACTGGGCTTTATTCTTC
TACTGTACCTGTCTTTAATCCTGATTGGAAAACTCCCTCCTTTCCTCACA
TTCATTTACAGGAGGACATTATTAATAGATGTCAACAATATGTGGGCCCT
CTGACAGTTAATGAAAAAAGGAGATTAAAATTAATTATGCCTGCTAGGTT
CTATCCTAACCTTACCAAATATTTGCCCTTGGACAAAGGCATTAAACCGT
ATTATCCTGAATATGCAGTTAATCATTACTTCAAAACTAGGCATTATTTA
CATACTCTGTGGAAGGCTGGCATTCTATATAAGAGAGAAACTACACGCAG
CGCCTCATTTTGTGGGTCACCATATTCTTGGGAACAAGAGCTACAGCATG
GGAGGTTGGTCTTCCAAACCTCGACAAGGCATGGGGACGAATCTTTCTGT
TCCCAATCCTCTGGGATTCTTTCCCGATCACCAGTTGGACCCTGCGTTCG
GAGCCAACTCAAACAATCCAGATTGGGACTTCAACCCCAACAAGGATCAC
TGGCCAGAGGCAAATCAGGTAGGAGCGGGAGCATTTGGTCCAGGGTTCAC
CCCACCACACGGAGGCCTTTTGGGGTGGAGCCCTCAGGCTCAGGGCATAT
TGACAACACTGCCAGCAGCACCTCCTCCTGCCTCCACCAATCGGCAGTCA
GGAAGACAGCCTACTCCCATCTCTCCACCTCTAAGAGACAGTCATCCTCA
GGCCATGCAGTGGAA

[0449] PARP1

[0450] Poly [ADP-ribose] polymerase 1 (PARP-1) is an enzyme that in humans is encoded by the PARP1 gene. PARP1 works to on single strands of DNA, modifies nuclear proteins by poly ADP-ribosylation, involved in differentiation, proliferation and tumor transformation. PARP1 also has a role in repair of single-stranded DNA (ssDNA) breaks. Reducing intracellular PARP1 levels with siRNA or inhibiting PARP1 activity with small molecules reduces repair of ssDNA breaks. In the absence of PARP1, when these breaks are encountered during DNA replication, the replication fork stalls, and double-strand DNA (dsDNA) breaks accumulate. These dsDNA breaks are repaired via homologous recombination (HR) repair, a potentially error-free repair mechanism. However, both BRCA1 and BRCA2 are at least partially necessary for the HR pathway to function. Therefore, cells that are deficient in BRCA1 or BRCA2 have been shown to be highly sensitive to PARP1 inhibition or knock-down, resulting in cell death by apoptosis, in stark contrast to cells with at least one good copy of both BRCA1 and BRCA2. Many breast cancers have defects in the BRCA1/BRCA2 HR repair pathway due to mutations in either BRCA1 or BRCA2 (termed BRCAness), or other essential genes in the pathway and thus thought to be highly sensitive to PARP1 inhibitors. PARP1 inhibitors are believed to be effective for cancers with BRCAness, due to the high sensitivity of the tumors to the inhibitor and the lack of deleterious effects on the remaining healthy cells with functioning BRCA HR pathway (Bryant et al. (2005) Nature 434 (7035): 913-7 and Farmer et al. (2005) Nature 434 (7035): 917-21. This is in contrast to conventional chemotherapies, which are highly toxic to all cells and can induce DNA damage in healthy cells, leading to secondary cancer generation.

[0451] Protein: PARP1 Gene: PARP1: (Homo sapiens, chromosome 1, 226548392-226595801 [NCBI Reference Sequence NC_{—}000001.10]; start site location: 226595630; strand: negative)

Gene Identification

| | |
|---|---|
| GeneID | 142 |
| HGNC | 270 |
| MIM | 173870 |

Targeted Sequences

| | | | Relative |
|---|---|---|---|
| | | | upstream |
| | | | location |
| | | | to gene |
| Sequence | Design | | start |
| ID No: | ID | Sequence (5′-3′) | site |
| 9595 | | CCGCCAAAGCTCCGGAAGCCCGACGCC | 14 |
| 9741 | | CCGCCTCGCCGCCTCGCGTGCGCTC | 60 |
| 9887 | | CGGGAACGCCCACGGAACCCGCGTC | 177 |
| 9933 | | CGGGTGGAGCTCTGCGGGCCGCTGC | 269 |
| 9992 | | CGCCGGCCCCAAACTCTTAAGTGTG | 696 |
| 10014 | | CGGGAAGCGCAGGCCCCCGCCTCGG | 749 |
| 10045 | | CGTTCTAACCTGCCGTCCACAGACC | 839 |

Target Shift Sequences

| | | Relative |
|---|---|---|
| | | upstream |
| | | location |
| Sequence | | to gene |
| ID No: | Sequence (5′-3′) | start site |
| 9595 | CCGCCAAAGCTCCGGAAGCCCGACGCC | 14 |
| 9596 | CGCCAAAGCTCCGGAAGCCC | 15 |
| 9597 | GCCAAAGCTCCGGAAGCCCG | 16 |
| 9598 | CCAAAGCTCCGGAAGCCCGA | 17 |
| 9599 | CAAAGCTCCGGAAGCCCGAC | 18 |
| 9600 | AAAGCTCCGGAAGCCCGACG | 19 |
| 9601 | AAGCTCCGGAAGCCCGACGC | 20 |
| 9602 | AGCTCCGGAAGCCCGACGCC | 21 |
| 9603 | GCTCCGGAAGCCCGACGCCA | 22 |
| 9604 | CTCCGGAAGCCCGACGCCAC | 23 |
| 9605 | TCCGGAAGCCCGACGCCACG | 24 |
| 9606 | CCGGAAGCCCGACGCCACGA | 25 |
| 9607 | CGGAAGCCCGACGCCACGAC | 26 |
| 9608 | GGAAGCCCGACGCCACGACC | 27 |
| 9609 | GAAGCCCGACGCCACGACCT | 28 |
| 9610 | AAGCCCGACGCCACGACCTA | 29 |
| 9611 | AGCCCGACGCCACGACCTAG | 30 |
| 9612 | GCCCGACGCCACGACCTAGA | 31 |
| 9613 | CCCGACGCCACGACCTAGAA | 32 |
| 9614 | CCGACGCCACGACCTAGAAA | 33 |
| 9615 | CGACGCCACGACCTAGAAAC | 34 |
| 9616 | GACGCCACGACCTAGAAACA | 35 |
| 9617 | ACGCCACGACCTAGAAACAC | 36 |
| 9618 | CGCCACGACCTAGAAACACG | 37 |
| 9619 | GCCACGACCTAGAAACACGC | 38 |
| 9620 | CCACGACCTAGAAACACGCT | 39 |
| 9621 | CACGACCTAGAAACACGCTG | 40 |
| 9622 | ACGACCTAGAAACACGCTGC | 41 |
| 9623 | CGACCTAGAAACACGCTGCC | 42 |
| 9624 | GACCTAGAAACACGCTGCCG | 43 |
| 9625 | ACCTAGAAACACGCTGCCGC | 44 |
| 9626 | CCTAGAAACACGCTGCCGCC | 45 |
| 9627 | CTAGAAACACGCTGCCGCCT | 46 |
| 9628 | TAGAAACACGCTGCCGCCTC | 47 |
| 9629 | AGAAACACGCTGCCGCCTCG | 48 |
| 9630 | GAAACACGCTGCCGCCTCGC | 49 |
| 9631 | AAACACGCTGCCGCCTCGCC | 50 |
| 9632 | AACACGCTGCCGCCTCGCCG | 51 |
| 9633 | ACACGCTGCCGCCTCGCCGC | 52 |
| 9634 | CACGCTGCCGCCTCGCCGCC | 53 |
| 9635 | ACGCTGCCGCCTCGCCGCCT | 54 |
| 9636 | CGCTGCCGCCTCGCCGCCTC | 55 |
| 9637 | GCTGCCGCCTCGCCGCCTCG | 56 |
| 9638 | CTGCCGCCTCGCCGCCTCGC | 57 |
| 9639 | TGCCGCCTCGCCGCCTCGCG | 58 |
| 9640 | GCCGCCTCGCCGCCTCGCGT | 59 |
| 9641 | CCGCCTCGCCGCCTCGCGTG | 60 |
| 9642 | CGCCTCGCCGCCTCGCGTGC | 61 |
| 9643 | GCCTCGCCGCCTCGCGTGCG | 62 |
| 9644 | CCTCGCCGCCTCGCGTGCGC | 63 |
| 9645 | CTCGCCGCCTCGCGTGCGCT | 64 |
| 9646 | TCGCCGCCTCGCGTGCGCTC | 65 |
| 9647 | CGCCGCCTCGCGTGCGCTCA | 66 |
| 9648 | GCCGCCTCGCGTGCGCTCAC | 67 |
| 9649 | CCGCCTCGCGTGCGCTCACC | 68 |
| 9650 | CGCCTCGCGTGCGCTCACCC | 69 |
| 9651 | GCCTCGCGTGCGCTCACCCA | 70 |
| 9652 | CCTCGCGTGCGCTCACCCAG | 71 |
| 9653 | CTCGCGTGCGCTCACCCAGC | 72 |
| 9654 | TCGCGTGCGCTCACCCAGCC | 73 |
| 9655 | CGCGTGCGCTCACCCAGCCG | 74 |
| 9656 | GCGTGCGCTCACCCAGCCGC | 75 |
| 9657 | CGTGCGCTCACCCAGCCGCA | 76 |
| 9658 | GTGCGCTCACCCAGCCGCAG | 77 |
| 9659 | TGCGCTCACCCAGCCGCAGG | 78 |
| 9660 | GCGCTCACCCAGCCGCAGGC | 79 |
| 9661 | CGCTCACCCAGCCGCAGGCG | 80 |
| 9662 | GCTCACCCAGCCGCAGGCGC | 81 |
| 9663 | CTCACCCAGCCGCAGGCGCC | 82 |
| 9664 | TCACCCAGCCGCAGGCGCCT | 83 |
| 9665 | CACCCAGCCGCAGGCGCCTG | 84 |
| 9666 | ACCCAGCCGCAGGCGCCTGA | 85 |
| 9667 | CCCAGCCGCAGGCGCCTGAG | 86 |
| 9668 | CCAGCCGCAGGCGCCTGAGC | 87 |
| 9669 | CAGCCGCAGGCGCCTGAGCG | 88 |
| 9670 | AGCCGCAGGCGCCTGAGCGG | 89 |
| 9671 | GCCGCAGGCGCCTGAGCGGC | 90 |
| 9672 | CCGCAGGCGCCTGAGCGGCC | 91 |
| 9673 | CGCAGGCGCCTGAGCGGCCA | 92 |
| 9674 | GCAGGCGCCTGAGCGGCCAG | 93 |
| 9675 | CAGGCGCCTGAGCGGCCAGA | 94 |
| 9676 | AGGCGCCTGAGCGGCCAGAG | 95 |
| 9677 | GGCGCCTGAGCGGCCAGAGC | 96 |
| 9678 | GCGCCTGAGCGGCCAGAGCC | 97 |
| 9679 | CGCCTGAGCGGCCAGAGCCG | 98 |
| 9680 | GCCTGAGCGGCCAGAGCCGC | 99 |
| 9681 | CCTGAGCGGCCAGAGCCGCC | 100 |
| 9682 | CTGAGCGGCCAGAGCCGCCA | 101 |
| 9683 | TGAGCGGCCAGAGCCGCCAC | 102 |
| 9684 | GAGCGGCCAGAGCCGCCACC | 103 |
| 9685 | AGCGGCCAGAGCCGCCACCG | 104 |
| 9686 | GCGGCCAGAGCCGCCACCGA | 105 |
| 9687 | CGGCCAGAGCCGCCACCGAA | 106 |
| 9688 | GGCCAGAGCCGCCACCGAAC | 107 |
| 9689 | GCCAGAGCCGCCACCGAACA | 108 |
| 9690 | CCAGAGCCGCCACCGAACAC | 109 |
| 9691 | CAGAGCCGCCACCGAACACG | 110 |
| 9692 | AGAGCCGCCACCGAACACGC | 111 |
| 9693 | GAGCCGCCACCGAACACGCC | 112 |
| 9694 | AGCCGCCACCGAACACGCCG | 113 |
| 9695 | GCCGCCACCGAACACGCCGC | 114 |
| 9696 | CCGCCACCGAACACGCCGCA | 115 |
| 9697 | CGCCACCGAACACGCCGCAC | 116 |
| 9698 | GCCACCGAACACGCCGCACC | 117 |
| 9699 | CCACCGAACACGCCGCACCG | 118 |
| 9700 | CACCGAACACGCCGCACCGG | 119 |
| 9701 | ACCGAACACGCCGCACCGGC | 120 |
| 9702 | CCGAACACGCCGCACCGGCC | 121 |
| 9703 | CGAACACGCCGCACCGGCCA | 122 |
| 9704 | GAACACGCCGCACCGGCCAC | 123 |
| 9705 | AACACGCCGCACCGGCCACC | 124 |
| 9706 | ACACGCCGCACCGGCCACCG | 125 |
| 9707 | CACGCCGCACCGGCCACCGC | 126 |
| 9708 | ACGCCGCACCGGCCACCGCC | 127 |
| 9709 | CGCCGCACCGGCCACCGCCG | 128 |
| 9710 | GCCGCACCGGCCACCGCCGT | 129 |
| 9711 | CCGCACCGGCCACCGCCGTT | 130 |
| 9712 | CGCACCGGCCACCGCCGTTC | 131 |
| 9713 | GCACCGGCCACCGCCGTTCC | 132 |
| 9714 | CACCGGCCACCGCCGTTCCC | 133 |
| 9715 | ACCGGCCACCGCCGTTCCCT | 134 |
| 9716 | CCGGCCACCGCCGTTCCCTG | 135 |
| 9717 | CGGCCACCGCCGTTCCCTGA | 136 |
| 9718 | GGCCACCGCCGTTCCCTGAT | 137 |
| 9719 | GCCACCGCCGTTCCCTGATA | 138 |
| 9720 | CCACCGCCGTTCCCTGATAG | 139 |
| 9721 | CACCGCCGTTCCCTGATAGA | 140 |
| 9722 | ACCGCCGTTCCCTGATAGAT | 141 |
| 9723 | CCGCCGTTCCCTGATAGATT | 142 |
| 9724 | CGCCGTTCCCTGATAGATTG | 143 |
| 9725 | GCCGTTCCCTGATAGATTGC | 144 |
| 9726 | CCGTTCCCTGATAGATTGCT | 145 |
| 9727 | CGTTCCCTGATAGATTGCTG | 146 |
| 9728 | GCCGCCAAAGCTCCGGAAGC | 13 |
| 9729 | TGCCGCCAAAGCTCCGGAAG | 12 |
| 9730 | CTGCCGCCAAAGCTCCGGAA | 11 |
| 9731 | GCTGCCGCCAAAGCTCCGGA | 10 |
| 9732 | AGCTGCCGCCAAAGCTCCGG | 9 |
| 9733 | TAGCTGCCGCCAAAGCTCCG | 8 |
| 9734 | CTAGCTGCCGCCAAAGCTCC | 7 |
| 9735 | CCTAGCTGCCGCCAAAGCTC | 6 |
| 9736 | CCCTAGCTGCCGCCAAAGCT | 5 |
| 9737 | CCCCTAGCTGCCGCCAAAGC | 4 |
| 9738 | TCCCCTAGCTGCCGCCAAAG | 3 |
| 9739 | CTCCCCTAGCTGCCGCCAAA | 2 |
| 9740 | CCTCCCCTAGCTGCCGCCAA | 1 |
| 9741 | CCGCCTCGCCGCCTCGCGTGCGCTC | 60 |
| 9742 | CGCCTCGCCGCCTCGCGTGC | 61 |
| 9743 | GCCTCGCCGCCTCGCGTGCG | 62 |
| 9744 | CCTCGCCGCCTCGCGTGCGC | 63 |
| 9745 | CTCGCCGCCTCGCGTGCGCT | 64 |
| 9746 | TCGCCGCCTCGCGTGCGCTC | 65 |
| 9747 | CGCCGCCTCGCGTGCGCTCA | 66 |
| 9748 | GCCGCCTCGCGTGCGCTCAC | 67 |
| 9749 | CCGCCTCGCGTGCGCTCACC | 68 |
| 9750 | CGCCTCGCGTGCGCTCACCC | 69 |
| 9751 | GCCTCGCGTGCGCTCACCCA | 70 |
| 9752 | CCTCGCGTGCGCTCACCCAG | 71 |
| 9753 | CTCGCGTGCGCTCACCCAGC | 72 |
| 9754 | TCGCGTGCGCTCACCCAGCC | 73 |
| 9755 | CGCGTGCGCTCACCCAGCCG | 74 |
| 9756 | GCGTGCGCTCACCCAGCCGC | 75 |
| 9757 | CGTGCGCTCACCCAGCCGCA | 76 |
| 9758 | GTGCGCTCACCCAGCCGCAG | 77 |
| 9759 | TGCGCTCACCCAGCCGCAGG | 78 |
| 9760 | GCGCTCACCCAGCCGCAGGC | 79 |
| 9761 | CGCTCACCCAGCCGCAGGCG | 80 |
| 9762 | GCTCACCCAGCCGCAGGCGC | 81 |
| 9763 | CTCACCCAGCCGCAGGCGCC | 82 |
| 9764 | TCACCCAGCCGCAGGCGCCT | 83 |
| 9765 | CACCCAGCCGCAGGCGCCTG | 84 |
| 9766 | ACCCAGCCGCAGGCGCCTGA | 85 |
| 9767 | CCCAGCCGCAGGCGCCTGAG | 86 |
| 9768 | CCAGCCGCAGGCGCCTGAGC | 87 |
| 9769 | CAGCCGCAGGCGCCTGAGCG | 88 |
| 9770 | AGCCGCAGGCGCCTGAGCGG | 89 |
| 9771 | GCCGCAGGCGCCTGAGCGGC | 90 |
| 9772 | CCGCAGGCGCCTGAGCGGCC | 91 |
| 9773 | CGCAGGCGCCTGAGCGGCCA | 92 |
| 9774 | GCAGGCGCCTGAGCGGCCAG | 93 |
| 9775 | CAGGCGCCTGAGCGGCCAGA | 94 |
| 9776 | AGGCGCCTGAGCGGCCAGAG | 95 |
| 9777 | GGCGCCTGAGCGGCCAGAGC | 96 |
| 9778 | GCGCCTGAGCGGCCAGAGCC | 97 |
| 9779 | CGCCTGAGCGGCCAGAGCCG | 98 |
| 9780 | GCCTGAGCGGCCAGAGCCGC | 99 |
| 9781 | CCTGAGCGGCCAGAGCCGCC | 100 |
| 9782 | CTGAGCGGCCAGAGCCGCCA | 101 |
| 9783 | TGAGCGGCCAGAGCCGCCAC | 102 |
| 9784 | GAGCGGCCAGAGCCGCCACC | 103 |
| 9785 | AGCGGCCAGAGCCGCCACCG | 104 |
| 9786 | GCGGCCAGAGCCGCCACCGA | 105 |
| 9787 | CGGCCAGAGCCGCCACCGAA | 106 |
| 9788 | GGCCAGAGCCGCCACCGAAC | 107 |
| 9789 | GCCAGAGCCGCCACCGAACA | 108 |
| 9790 | CCAGAGCCGCCACCGAACAC | 109 |
| 9791 | CAGAGCCGCCACCGAACACG | 110 |
| 9792 | AGAGCCGCCACCGAACACGC | 111 |
| 9793 | GAGCCGCCACCGAACACGCC | 112 |
| 9794 | AGCCGCCACCGAACACGCCG | 113 |
| 9795 | GCCGCCACCGAACACGCCGC | 114 |
| 9796 | CCGCCACCGAACACGCCGCA | 115 |
| 9797 | CGCCACCGAACACGCCGCAC | 116 |
| 9798 | GCCACCGAACACGCCGCACC | 117 |
| 9799 | CCACCGAACACGCCGCACCG | 118 |
| 9800 | CACCGAACACGCCGCACCGG | 119 |
| 9801 | ACCGAACACGCCGCACCGGC | 120 |
| 9802 | CCGAACACGCCGCACCGGCC | 121 |
| 9803 | CGAACACGCCGCACCGGCCA | 122 |
| 9804 | GAACACGCCGCACCGGCCAC | 123 |
| 9805 | AACACGCCGCACCGGCCACC | 124 |
| 9806 | ACACGCCGCACCGGCCACCG | 125 |
| 9807 | CACGCCGCACCGGCCACCGC | 126 |
| 9808 | ACGCCGCACCGGCCACCGCC | 127 |
| 9809 | CGCCGCACCGGCCACCGCCG | 128 |
| 9810 | GCCGCACCGGCCACCGCCGT | 129 |
| 9811 | CCGCACCGGCCACCGCCGTT | 130 |
| 9812 | CGCACCGGCCACCGCCGTTC | 131 |
| 9813 | GCACCGGCCACCGCCGTTCC | 132 |
| 9814 | CACCGGCCACCGCCGTTCCC | 133 |
| 9815 | ACCGGCCACCGCCGTTCCCT | 134 |
| 9816 | CCGGCCACCGCCGTTCCCTG | 135 |
| 9817 | CGGCCACCGCCGTTCCCTGA | 136 |
| 9818 | GGCCACCGCCGTTCCCTGAT | 137 |
| 9819 | GCCACCGCCGTTCCCTGATA | 138 |
| 9820 | CCACCGCCGTTCCCTGATAG | 139 |
| 9821 | CACCGCCGTTCCCTGATAGA | 140 |
| 9822 | ACCGCCGTTCCCTGATAGAT | 141 |
| 9823 | CCGCCGTTCCCTGATAGATT | 142 |
| 9824 | CGCCGTTCCCTGATAGATTG | 143 |
| 9825 | GCCGTTCCCTGATAGATTGC | 144 |
| 9826 | CCGTTCCCTGATAGATTGCT | 145 |
| 9827 | CGTTCCCTGATAGATTGCTG | 146 |
| 9828 | GCCGCCTCGCCGCCTCGCGT | 59 |
| 9829 | TGCCGCCTCGCCGCCTCGCG | 58 |
| 9830 | CTGCCGCCTCGCCGCCTCGC | 57 |
| 9831 | GCTGCCGCCTCGCCGCCTCG | 56 |
| 9832 | CGCTGCCGCCTCGCCGCCTC | 55 |
| 9833 | ACGCTGCCGCCTCGCCGCCT | 54 |
| 9834 | CACGCTGCCGCCTCGCCGCC | 53 |
| 9835 | ACACGCTGCCGCCTCGCCGC | 52 |
| 9836 | AACACGCTGCCGCCTCGCCG | 51 |
| 9837 | AAACACGCTGCCGCCTCGCC | 50 |
| 9838 | GAAACACGCTGCCGCCTCGC | 49 |
| 9839 | AGAAACACGCTGCCGCCTCG | 48 |
| 9840 | TAGAAACACGCTGCCGCCTC | 47 |
| 9841 | CTAGAAACACGCTGCCGCCT | 46 |
| 9842 | CCTAGAAACACGCTGCCGCC | 45 |
| 9843 | ACCTAGAAACACGCTGCCGC | 44 |
| 9844 | GACCTAGAAACACGCTGCCG | 43 |
| 9845 | CGACCTAGAAACACGCTGCC | 42 |
| 9846 | ACGACCTAGAAACACGCTGC | 41 |
| 9847 | CACGACCTAGAAACACGCTG | 40 |
| 9848 | CCACGACCTAGAAACACGCT | 39 |
| 9849 | GCCACGACCTAGAAACACGC | 38 |
| 9850 | CGCCACGACCTAGAAACACG | 37 |
| 9851 | ACGCCACGACCTAGAAACAC | 36 |
| 9852 | GACGCCACGACCTAGAAACA | 35 |
| 9853 | CGACGCCACGACCTAGAAAC | 34 |
| 9854 | CCGACGCCACGACCTAGAAA | 33 |
| 9855 | CCCGACGCCACGACCTAGAA | 32 |
| 9856 | GCCCGACGCCACGACCTAGA | 31 |
| 9857 | AGCCCGACGCCACGACCTAG | 30 |
| 9858 | AAGCCCGACGCCACGACCTA | 29 |
| 9859 | GAAGCCCGACGCCACGACCT | 28 |
| 9860 | GGAAGCCCGACGCCACGACC | 27 |
| 9861 | CGGAAGCCCGACGCCACGAC | 26 |
| 9862 | CCGGAAGCCCGACGCCACGA | 25 |
| 9863 | TCCGGAAGCCCGACGCCACG | 24 |
| 9864 | CTCCGGAAGCCCGACGCCAC | 23 |
| 9865 | GCTCCGGAAGCCCGACGCCA | 22 |
| 9866 | AGCTCCGGAAGCCCGACGCC | 21 |
| 9867 | AAGCTCCGGAAGCCCGACGC | 20 |
| 9868 | AAAGCTCCGGAAGCCCGACG | 19 |
| 9869 | CAAAGCTCCGGAAGCCCGAC | 18 |
| 9870 | CCAAAGCTCCGGAAGCCCGA | 17 |
| 9871 | GCCAAAGCTCCGGAAGCCCG | 16 |
| 9872 | CGCCAAAGCTCCGGAAGCCC | 15 |
| 9873 | CCGCCAAAGCTCCGGAAGCC | 14 |
| 9874 | GCCGCCAAAGCTCCGGAAGC | 13 |
| 9875 | TGCCGCCAAAGCTCCGGAAG | 12 |
| 9876 | CTGCCGCCAAAGCTCCGGAA | 11 |
| 9877 | GCTGCCGCCAAAGCTCCGGA | 10 |
| 9878 | AGCTGCCGCCAAAGCTCCGG | 9 |
| 9879 | TAGCTGCCGCCAAAGCTCCG | 8 |
| 9880 | CTAGCTGCCGCCAAAGCTCC | 7 |
| 9881 | CCTAGCTGCCGCCAAAGCTC | 6 |
| 9882 | CCCTAGCTGCCGCCAAAGCT | 5 |
| 9883 | CCCCTAGCTGCCGCCAAAGC | 4 |
| 9884 | TCCCCTAGCTGCCGCCAAAG | 3 |
| 9885 | CTCCCCTAGCTGCCGCCAAA | 2 |
| 9886 | CCTCCCCTAGCTGCCGCCAA | 1 |
| 9887 | CGGGAACGCCCACGGAACCCGCGTC | 177 |
| 9888 | GGGAACGCCCACGGAACCCG | 178 |
| 9889 | GGAACGCCCACGGAACCCGC | 179 |
| 9890 | GAACGCCCACGGAACCCGCG | 180 |
| 9891 | AACGCCCACGGAACCCGCGT | 181 |
| 9892 | ACGCCCACGGAACCCGCGTC | 182 |
| 9893 | CGCCCACGGAACCCGCGTCC | 183 |
| 9894 | GCCCACGGAACCCGCGTCCA | 184 |
| 9895 | CCCACGGAACCCGCGTCCAC | 185 |
| 9896 | CCACGGAACCCGCGTCCACG | 186 |
| 9897 | CACGGAACCCGCGTCCACGG | 187 |
| 9898 | ACGGAACCCGCGTCCACGGG | 188 |
| 9899 | CGGAACCCGCGTCCACGGGG | 189 |
| 9900 | GGAACCCGCGTCCACGGGGC | 190 |
| 9901 | GAACCCGCGTCCACGGGGCG | 191 |
| 9902 | AACCCGCGTCCACGGGGCGG | 192 |
| 9903 | ACCCGCGTCCACGGGGCGGG | 193 |
| 9904 | CCCGCGTCCACGGGGCGGGG | 194 |
| 9905 | CCGCGTCCACGGGGCGGGGC | 195 |
| 9906 | CGCGTCCACGGGGCGGGGCC | 196 |
| 9907 | GCGTCCACGGGGCGGGGCCG | 197 |
| 9908 | CGTCCACGGGGCGGGGCCGG | 198 |
| 9909 | GTCCACGGGGCGGGGCCGGC | 199 |
| 9910 | TCCACGGGGCGGGGCCGGCG | 200 |
| 9911 | CCACGGGGCGGGGCCGGCGG | 201 |
| 9912 | CACGGGGCGGGGCCGGCGGC | 202 |
| 9913 | GCGGGAACGCCCACGGAACC | 176 |
| 9914 | CGCGGGAACGCCCACGGAAC | 175 |
| 9915 | CCGCGGGAACGCCCACGGAA | 174 |
| 9916 | GCCGCGGGAACGCCCACGGA | 173 |
| 9917 | GGCCGCGGGAACGCCCACGG | 172 |
| 9918 | TGGCCGCGGGAACGCCCACG | 171 |
| 9919 | CTGGCCGCGGGAACGCCCAC | 170 |
| 9920 | CCTGGCCGCGGGAACGCCCA | 169 |
| 9921 | GCCTGGCCGCGGGAACGCCC | 168 |
| 9922 | TGCCTGGCCGCGGGAACGCC | 167 |
| 9923 | ATGCCTGGCCGCGGGAACGC | 166 |
| 9924 | GATGCCTGGCCGCGGGAACG | 165 |
| 9925 | TGATGCCTGGCCGCGGGAAC | 164 |
| 9926 | CTGATGCCTGGCCGCGGGAA | 163 |
| 9927 | GCTGATGCCTGGCCGCGGGA | 162 |
| 9928 | TGCTGATGCCTGGCCGCGGG | 161 |
| 9929 | TTGCTGATGCCTGGCCGCGG | 160 |
| 9930 | ATTGCTGATGCCTGGCCGCG | 159 |
| 9931 | GATTGCTGATGCCTGGCCGC | 158 |
| 9932 | AGATTGCTGATGCCTGGCCG | 157 |
| 9933 | CGGGTGGAGCTCTGCGGGCCGCTGC | 269 |
| 9934 | GGGTGGAGCTCTGCGGGCCG | 270 |
| 9935 | GGTGGAGCTCTGCGGGCCGC | 271 |
| 9936 | GTGGAGCTCTGCGGGCCGCT | 272 |
| 9937 | TGGAGCTCTGCGGGCCGCTG | 273 |
| 9938 | GGAGCTCTGCGGGCCGCTGC | 274 |
| 9939 | GAGCTCTGCGGGCCGCTGCC | 275 |
| 9940 | AGCTCTGCGGGCCGCTGCCC | 276 |
| 9941 | GCTCTGCGGGCCGCTGCCCT | 277 |
| 9942 | CTCTGCGGGCCGCTGCCCTG | 278 |
| 9943 | TCTGCGGGCCGCTGCCCTGG | 279 |
| 9944 | CTGCGGGCCGCTGCCCTGGG | 280 |
| 9945 | TGCGGGCCGCTGCCCTGGGG | 281 |
| 9946 | GCGGGCCGCTGCCCTGGGGG | 282 |
| 9947 | CGGGCCGCTGCCCTGGGGGC | 283 |
| 9948 | GGGCCGCTGCCCTGGGGGCC | 284 |
| 9949 | GGCCGCTGCCCTGGGGGCCG | 285 |
| 9950 | GCCGCTGCCCTGGGGGCCGA | 286 |
| 9951 | CCGCTGCCCTGGGGGCCGAG | 287 |
| 9952 | CGCTGCCCTGGGGGCCGAGG | 288 |
| 9953 | GCTGCCCTGGGGGCCGAGGC | 289 |
| 9954 | CTGCCCTGGGGGCCGAGGCG | 290 |
| 9955 | TGCCCTGGGGGCCGAGGCGG | 291 |
| 9956 | GCCCTGGGGGCCGAGGCGGG | 292 |
| 9957 | CCCTGGGGGCCGAGGCGGGG | 293 |
| 9958 | CCTGGGGGCCGAGGCGGGGC | 294 |
| 9959 | CTGGGGGCCGAGGCGGGGCT | 295 |
| 9960 | TGGGGGCCGAGGCGGGGCTT | 296 |
| 9961 | CCGGGTGGAGCTCTGCGGGC | 268 |
| 9962 | GCCGGGTGGAGCTCTGCGGG | 267 |
| 9963 | TGCCGGGTGGAGCTCTGCGG | 266 |
| 9964 | CTGCCGGGTGGAGCTCTGCG | 265 |
| 9965 | CCTGCCGGGTGGAGCTCTGC | 264 |
| 9966 | GCCTGCCGGGTGGAGCTCTG | 263 |
| 9967 | CGCCTGCCGGGTGGAGCTCT | 262 |
| 9968 | GCGCCTGCCGGGTGGAGCTC | 261 |
| 9969 | GGCGCCTGCCGGGTGGAGCT | 260 |
| 9970 | GGGCGCCTGCCGGGTGGAGC | 259 |
| 9971 | CGGGCGCCTGCCGGGTGGAG | 258 |
| 9972 | CCGGGCGCCTGCCGGGTGGA | 257 |
| 9973 | CCCGGGCGCCTGCCGGGTGG | 256 |
| 9974 | TCCCGGGCGCCTGCCGGGTG | 255 |
| 9975 | TTCCCGGGCGCCTGCCGGGT | 254 |
| 9976 | TTTCCCGGGCGCCTGCCGGG | 253 |
| 9977 | GTTTCCCGGGCGCCTGCCGG | 252 |
| 9978 | AGTTTCCCGGGCGCCTGCCG | 251 |
| 9979 | GAGTTTCCCGGGCGCCTGCC | 250 |
| 9980 | GGAGTTTCCCGGGCGCCTGC | 249 |
| 9981 | CGGAGTTTCCCGGGCGCCTG | 248 |
| 9982 | GCGGAGTTTCCCGGGCGCCT | 247 |
| 9983 | GGCGGAGTTTCCCGGGCGCC | 246 |
| 9984 | GGGCGGAGTTTCCCGGGCGC | 245 |
| 9985 | GGGGCGGAGTTTCCCGGGCG | 244 |
| 9986 | GGGGGCGGAGTTTCCCGGGC | 243 |
| 9987 | GGGGGGCGGAGTTTCCCGGG | 242 |
| 9988 | CGGGGGGCGGAGTTTCCCGG | 241 |
| 9989 | CCGGGGGGCGGAGTTTCCCG | 240 |
| 9990 | GCCGGGGGGCGGAGTTTCCC | 239 |
| 9991 | GGCCGGGGGGCGGAGTTTCC | 238 |
| 9992 | CGCCGGCCCCAAACTCTTAAGTGTG | 696 |
| 9993 | GCCGGCCCCAAACTCTTAAG | 697 |
| 9994 | CCGGCCCCAAACTCTTAAGT | 698 |
| 9995 | CGGCCCCAAACTCTTAAGTG | 699 |
| 9996 | ACGCCGGCCCCAAACTCTTA | 695 |
| 9997 | CACGCCGGCCCCAAACTCTT | 694 |
| 9998 | CCACGCCGGCCCCAAACTCT | 693 |
| 9999 | ACCACGCCGGCCCCAAACTC | 692 |
| 10000 | TACCACGCCGGCCCCAAACT | 691 |
| 10001 | CTACCACGCCGGCCCCAAAC | 690 |
| 10002 | GCTACCACGCCGGCCCCAAA | 689 |
| 10003 | AGCTACCACGCCGGCCCCAA | 688 |
| 10004 | GAGCTACCACGCCGGCCCCA | 687 |
| 10005 | TGAGCTACCACGCCGGCCCC | 686 |
| 10006 | ATGAGCTACCACGCCGGCCC | 685 |
| 10007 | CATGAGCTACCACGCCGGCC | 684 |
| 10008 | GCATGAGCTACCACGCCGGC | 683 |
| 10009 | GGCATGAGCTACCACGCCGG | 682 |
| 10010 | GGGCATGAGCTACCACGCCG | 681 |
| 10011 | GGGGCATGAGCTACCACGCC | 680 |
| 10012 | AGGGGCATGAGCTACCACGC | 679 |
| 10013 | CAGGGGCATGAGCTACCACG | 678 |
| 10014 | CGGGAAGCGCAGGCCCCCGCCTCGG | 749 |
| 10015 | GGGAAGCGCAGGCCCCCGCC | 750 |
| 10016 | GGAAGCGCAGGCCCCCGCCT | 751 |
| 10017 | GAAGCGCAGGCCCCCGCCTC | 752 |
| 10018 | AAGCGCAGGCCCCCGCCTCG | 753 |
| 10019 | AGCGCAGGCCCCCGCCTCGG | 754 |
| 10020 | GCGCAGGCCCCCGCCTCGGG | 755 |
| 10021 | CGCAGGCCCCCGCCTCGGGA | 756 |
| 10022 | GCAGGCCCCCGCCTCGGGAA | 757 |
| 10023 | CAGGCCCCCGCCTCGGGAAT | 758 |
| 10024 | AGGCCCCCGCCTCGGGAATA | 759 |
| 10025 | GGCCCCCGCCTCGGGAATAT | 760 |
| 10026 | GCCCCCGCCTCGGGAATATA | 761 |
| 10027 | CCCCCGCCTCGGGAATATAG | 762 |
| 10028 | CCCCGCCTCGGGAATATAGT | 763 |
| 10029 | CCCGCCTCGGGAATATAGTT | 764 |
| 10030 | CCGCCTCGGGAATATAGTTG | 765 |
| 10031 | CGCCTCGGGAATATAGTTGA | 766 |
| 10032 | GCCTCGGGAATATAGTTGAT | 767 |
| 10033 | CCGGGAAGCGCAGGCCCCCG | 748 |
| 10034 | TCCGGGAAGCGCAGGCCCCC | 747 |
| 10035 | GTCCGGGAAGCGCAGGCCCC | 746 |
| 10036 | GGTCCGGGAAGCGCAGGCCC | 745 |
| 10037 | GGGTCCGGGAAGCGCAGGCC | 744 |
| 10038 | TGGGTCCGGGAAGCGCAGGC | 743 |
| 10039 | CTGGGTCCGGGAAGCGCAGG | 742 |
| 10040 | GCTGGGTCCGGGAAGCGCAG | 741 |
| 10041 | AGCTGGGTCCGGGAAGCGCA | 740 |
| 10042 | CAGCTGGGTCCGGGAAGCGC | 739 |
| 10043 | GCAGCTGGGTCCGGGAAGCG | 738 |
| 10044 | GGCAGCTGGGTCCGGGAAGC | 737 |
| 10045 | CGTTCTAACCTGCCGTCCACAGACC | 839 |
| 10046 | GTTCTAACCTGCCGTCCACA | 840 |
| 10047 | TTCTAACCTGCCGTCCACAG | 841 |
| 10048 | TCTAACCTGCCGTCCACAGA | 842 |
| 10049 | CTAACCTGCCGTCCACAGAC | 843 |
| 10050 | TAACCTGCCGTCCACAGACC | 844 |
| 10051 | AACCTGCCGTCCACAGACCG | 845 |
| 10052 | ACCTGCCGTCCACAGACCGT | 846 |
| 10053 | CCTGCCGTCCACAGACCGTC | 847 |
| 10054 | CTGCCGTCCACAGACCGTCG | 848 |
| 10055 | TGCCGTCCACAGACCGTCGG | 849 |
| 10056 | GCCGTCCACAGACCGTCGGG | 850 |
| 10057 | CCGTCCACAGACCGTCGGGA | 851 |
| 10058 | CGTCCACAGACCGTCGGGAC | 852 |
| 10059 | GTCCACAGACCGTCGGGACA | 853 |
| 10060 | TCCACAGACCGTCGGGACAA | 854 |
| 10061 | CCACAGACCGTCGGGACAAA | 855 |
| 10062 | CACAGACCGTCGGGACAAAA | 856 |
| 10063 | ACAGACCGTCGGGACAAAAT | 857 |
| 10064 | CAGACCGTCGGGACAAAATA | 858 |
| 10065 | AGACCGTCGGGACAAAATAC | 859 |
| 10066 | GACCGTCGGGACAAAATACC | 860 |
| 10067 | ACCGTCGGGACAAAATACCA | 861 |
| 10068 | CCGTCGGGACAAAATACCAA | 862 |
| 10069 | CGTCGGGACAAAATACCAAC | 863 |
| 10070 | GTCGGGACAAAATACCAACT | 864 |
| 10071 | TCGGGACAAAATACCAACTG | 865 |
| 10072 | CGGGACAAAATACCAACTGA | 866 |
| 10073 | GCGTTCTAACCTGCCGTCCA | 838 |
| 10074 | GGCGTTCTAACCTGCCGTCC | 837 |
| 10075 | GGGCGTTCTAACCTGCCGTC | 836 |
| 10076 | CGGGCGTTCTAACCTGCCGT | 835 |
| 10077 | ACGGGCGTTCTAACCTGCCG | 834 |
| 10078 | GACGGGCGTTCTAACCTGCC | 833 |
| 10079 | GGACGGGCGTTCTAACCTGC | 832 |
| 10080 | TGGACGGGCGTTCTAACCTG | 831 |
| 10081 | TTGGACGGGCGTTCTAACCT | 830 |
| 10082 | CTTGGACGGGCGTTCTAACC | 829 |
| 10083 | GCTTGGACGGGCGTTCTAAC | 828 |
| 10084 | GGCTTGGACGGGCGTTCTAA | 827 |
| 10085 | TGGCTTGGACGGGCGTTCTA | 826 |
| 10086 | CTGGCTTGGACGGGCGTTCT | 825 |
| 10087 | CCTGGCTTGGACGGGCGTTC | 824 |
| 10088 | TCCTGGCTTGGACGGGCGTT | 823 |
| 10089 | CTCCTGGCTTGGACGGGCGT | 822 |
| 10090 | CCTCCTGGCTTGGACGGGCG | 821 |
| 10091 | CCCTCCTGGCTTGGACGGGC | 820 |
| 10092 | ACCCTCCTGGCTTGGACGGG | 819 |
| 10093 | CACCCTCCTGGCTTGGACGG | 818 |
| 10094 | CCACCCTCCTGGCTTGGACG | 817 |

### Examples

Genetic Code (5′ Upstream Region)

(SEQ ID NO: 11981)

GGTGGATCTCCACATGCAGAAGAATGTAGCTGGACCCATACCTTACACCA
AATGTTTGTTGTGAGTTTATTTACTTTTTTGTGTGTGTGGAGACAGGGTC
GTGCTATGTTGTCCAGGCTGATCTAGAACTCCTTACCTAGAGACACTGCC
AAGGTAAGTGAGGGCCAAGTGGACACTGAGTGATTCTGTGCCTCACTGAG
CAAAAATAACTAAACATGGGCGAAGGAGAGCCCAATGATCCCAGGGACAA
AATGTCATCACGGGCATTCTGCGCACGCTTGCCAGGATACAGGAGAAGCA
ACCAGACACTTCATTCATCTTCTCAGAATGTTCATTAACATGTTCAGAAA
GGTGGAAAACCTTACTTGCTAAAGAGAAGGAAATTGGAGGCATGGCCAAA
AGTATTCAAGGCCCTTTATGAAAAAGAAATGAAAACTGATATCCCTCCTA
AAAGAGAAGTAAAACAGAAATTCAGAGATTCTAATGCACCCGAAAGGCCT
CCTTTGGGCTTTCACTTTGTGTTCTGAGTACTGCCCTCAAATCAAAGGAG
ATCCCGGTCTGTCCACTGGCAGTGATGCCAAGAACCTGGGAGGGACATGA
GTGACCATGCTGCAGATGGCAAGCAGCCCAAAAAGAAGGCTTCTCAACTG
AAGGAAAAGTACCAAGAGCAGAATGCTGCATATCCAGCCAAAGGAAAGCT
GATGTGGCAAAAATGATGCTGTCAAGGCCGAAAAAGGCAAGAAAAAAAAA
CAAAGCGGAGAAAGACAGAGAAGGTAAGGAAAATAAAAAATGAAGTCGAT
GATAATGACAAATAAGGTGGTTCTATGGCAGCTTTTTTTTTTTTCTCTTG
TCTATAAAGCATTTAACCTACCTGGACACAGCTCATTCCTTTTAAAGAAA
AAAATTGAAATGTAAAGCCACCTAAGATTTATTTGTAAACTGCATGATGG
CGTTCTTTTTCTGTTTTTGTATTATTAACAAGAATTATCAAGTAATTCTT
CAGACAACCCTGTCCTGGTGGTATTTTGTATAGCCACCAACTTTGCCTGG
TATACTATAGGGGTTATAAATCAGCATGGGAATTTCAAATTTAAGGCACA
GTATAAGTTAGTTATATACAAATGTGAAGTAACATTATTAATTAAACTGT
TGGCCTGTGCGAAGGGAGGGCCAACTGTGGGATTCAGTCATTCATTCAAC
AAATATTGGTGAGTGCCTGACACTGTTCCAGGCACTGAGGCTATTGCAAC
AAAACAGACACAAGCTCCTGCCCTCATGGAGCTTACATTCTGGTGAGGGA
TACAGAGCCACCAAAAAGGATGGCAGCTGGGCCATGAGAAAGGATCAAAG
TCAGGAAGTTAGAATTCGGGGATGGATTGAACATGGGACAAAAGAGAAGA
GTCAAGTTGACTACAAAGCATTTGGCCTAAGTAATGCAAAGAATGGTGGG
CCATTTCCTGAGATGGGAAGCACTAGGGTAGTTTTGGACATAAATGGAGA
TGCATATAAGCCATCCAAACTGAAATATTGAGAAGGCAGTAGGTGATAGT
TGGCTTTCCTTAGGTTCTAGGGCAGGAATTCTTAACCTTTTGTGTGTGTG
CCTAGGACCCCTTTGGTGGTCCATGAAGCCCTTTCCAGAATAAATATTGT
GGAGGAACCTACCTTAATGCAATAGTAGCTTCTAGGTACATTATCAGGCA
AACTATCCCACAAGTTACAAAACAGAAAGCCTCACAGACCAAATTATGAT
GCTTGAATTGCAGGGTTTATTGAATCAGTTTAAAACCACTTACAGCAAGA
ACTCGATGGGGTGCATAACATACACAGGATAGGGTACAGGCGAGGCAGAT
GGACCACACCACCAGAACCTAGAATTAGGGAATCCTCCCCTCCCCTCCCC
TCCCACCCCTCCCCCCTTCCCCCTCCCCTCCCCTCCCCTCCTCCCCTCCT
CTCCCATCCTCCCCTCCCCTCCCATCCTCCCCTCCCCTCCCCTTTTCTCT
TCTTTTCTTTTTTTGAGACTGTCTCACTATGTTGCCCAGGCTGGAGTGCA
ATGGCGTGATCTCGGCTCACTGCAACTTCCACCTCCTGGGTTCAAGCGAT
TCTCATGCCTCAGCCTCCCGAGTAGCTGGGATTACAGGCACGCACCACAA
TGCCCAGCTAATTTTTGTATTCTTAGTAGAGACGGGGTTTCACCATGTTG
ACCAGGCTGGTTTTGAACTCCTGACCTTAGGTGATCCACCCGCCTCAGAT
TCCCAAAGCGCTGGGATTACAGGCATGAGCCACTGCACCTGGCTAATATT
GATATGTTTTCCCTCTCTCTGCCGCATCAGCCTGTCCCACTGACAGAGTT
GAGGATGCTCAAGGCGGCTCAACAGAGGGTACCTGGAGCAACTCACACTG
CACTATCAGAGAGACACAAGTGCAAGCACACTCAGCCACAGCTGCAGCTC
ACCAATCAGCCTGCTGAACAGACCTGAACTTTAGCTGCATTTTTGGGGCA
GAGCATATGGGTGCCAGGATGGGACCATAATCTTATCACCAATGAGTGGC
CATTTAGGGATGATATAGTTGTCAACCCAGAGATGGCATGATCATGCCTT
TTGACTTGGTCATTCTCTAAGTAAAACTTTTATTTGTTCCATCATATTTT
CCACTTATTCTGTTTACCTTCAAAATATCTTTTTTTTTTTTTTTTGAGAC
AGGGTCACACTGTCACCCAGGCTAGAGTCCAGTGGCACTATCATGGCTCA
CCACAGCCTCAACCTTCAGGGCTCAGGTGATCCTCCCACTTCAGCCTCCC
GAGTAGATGGGACTACAGGCACCTGCCACCACCCCCAGCTAATTTTTGTA
GAGACAAGGTTTTGCCATGTTGTCCAGGCTGGTCTTGAACTCCTGGGCTC
AAGGGATCCGGCCACCTCAGCCTCCCAAAGTGCTAGGATTATAGGCATGA
GCCACTGTGCCCAGCCTACCTTCAACGTATCTAACTGGTTACTAACTTTT
AGGATTCGGCCTATGTCTCACAACCTTCTTGCTTACTCAACATCCTTGTC
TCTTAAGCCACTAGCTTCTTCTCTATGGTTAACACTTTTTATGAGTTTTA
TTCATCTGCTTATTTTTCTTATCCTCTATACCAGAATTGAATATTTTCAA
ATAAAGCACACTCATGTTACAATCTTTGAAATGAAAAAAAAAAATGCATA
GGATTAGAAAAGAAACCAATTTTAATAAACTATATTTTGAAGTATAGTTC
TATATTAAACAACAAGATCTAGGCCAGGTGCAGTGGCTCATGCCTGTAAT
CCCAGCAATTTGGGAAGTCGAGGTGGGAGGATTGCTTGAGGCCAGGGGTT
CAAGACCAGCCTGGGCAACATGGAGAGATTCCCCATCTCTTTCTTTACAC
ACACACACACACACACACACAAAATATCTGATAGCAACAGGTGCAGTCAT
TACCACAATTTCGAGTAGTGATGAGCTTAATAATATTTCGAGTTATCACC
AACAACTGTAAAGTAACATGAAAACGTCTGTGATGACTATTGCCCACAAA
GTCACAGGTACTGCTAATACTCCTGGTATTTGTAGTCAAATTCATAATAA
AGGAAATGCTAGGTTTCAGTTGGTATTTTGTCCCGACGGTCTGTGGACGG
CAGGTTAGAACGCCCGTCCAAGCCAGGAGGGTGGACCTAGCACTGCAGGG
TCCACCTCGGGCCAATCAACTATATTCCCGAGGCGGGGGCCTGCGCTTCC
CGGACCCAGCTGCCCTCAGGGGAGAGAGGACACACTTAAGAGTTTGGGGC
CGGCGTGGTAGCTCATGCCCCTGATCCCAGCACTTCGGGAGGCTGAGGCG
TGAAGATCACTTGTAGCAGGAGTTTGAGACCAGTCTAGCCAACTTGGCGA
GACCCTGTCCCTAAAAAAAATTTTTTTTTAATTAGCCAGTTGTGGTGAGC
GCCTGTAGTCCCAGCTACTCGGGAGGCTGAGGTGGGAGGATCGCTGGGCT
CAGGAGTTCCAGACTGCAGTGAGCCATGATGGCGGCACTGCACTCCAGCG
CGGTGAGACTCAGTCTCAAAAATAAAAGGGGGAGGGGTTGGGGGTAAAAT
TAGTTGTGAAATCAAGTAAGACTTCCTGGGACAGAACAATCAAAGGGGTG
GCGCCGGGTCCTCCAAAGAGCTACTAGCTCAGCCCAAGCCCCGCCTCGGC
CCCCAGGGCAGCGGCCCGCAGAGCTCCACCCGGCAGGCGCCCGGGAAACT
CCGCCCCCCGGCCGGCAGGGGGCGCGCGCGCCGCCGGCCCCGCCCCGTGG
ACGCGGGTTCCGTGGGCGTTCCCGCGGCCAGGCATCAGCAATCTATCAGG
GAACGGCGGTGGCCGGTGCGGCGTGTTCGGTGGCGGCTCTGGCCGCTCAG
GCGCCTGCGGCTGGGTGAGCGCACGCGAGGCGGCGAGGCGGCAGCGTGTT
TCTAGGTCGTGGCGTCGGGCTTCCGGAGCTTTGGCGGCAGCTAGGGGAGG
ATG

[0453] TNFα

[0454] Tumor necrosis factor is a cytokine produced primarily by activated macrophages (Ml type) and other cells including CD4+ lymphocytes, NK cells and neurons (Pfeffer K. 2003 Cytokine Growth Factor Rev. 14(3-4):185-91) to regulate immune cells during an acute inflammatory response. TNF was originally characterized its ability to induce tumor cell apoptosis and cachexia, however, its roles are now recognized to impart both beneficial (inflammation and in protective immune responses against a variety of infectious pathogens) and detrimental effects (sepsis, cancer, autoimmune disease). TNF, an endogenous pyrogen, induces fever, apoptotic cell death, cachexia, inflammation, inhibits tumorigenesis and viral replication and mediates sepsis by responding to IL-1 and IL-6 producing cells. Dysregulation of TNF production has been implicated in a variety of human diseases including Alzheimer's disease, cancer, major depression and inflammatory bowel disease (IBD). TNFα can be produced ectopically in the setting of malignancy and parallels parathyroid hormone both in causing secondary hypercalcemia and in the cancers with which excessive production is associated.

[0455] Protein: TNFα Gene: TNFα (Homo sapiens, chromosome 6, 31543344-31546113 [NCBI Reference Sequence: NC_{—}000006.11]; start site location: 31543519; strand: positive)

Gene Identification

| | |
|---|---|
| GeneID | 7124 |
| HGNC | 11892 |
| HPRD | 01855 |
| MIM | 191160 |

Targeted Sequences

| | | | Relative |
|---|---|---|---|
| | | | upstream |
| | | | location |
| | De- | | to gene |
| Sequence | sign | | start |
| ID No: | ID | Sequence (5′-3′) | site |
| 10095 | | CGGGGAAAGAATCATTCAACCAGCGG | 229 |
| 10096 | TNF1 | CGGTTTCTTCTCCATCGCGGGGGCG | 326 |
| 10129 | | CTGCTCCGATTCCGAGGGGGGTCTTCT | 412 |
| 10154 | | CTCCGTGTGGGGCTCTGGTCGGCAGCT | 1464 |
| 10207 | | CGCAGCCCCGTGGTACATCGAGTGCAGC | 2151 |

Target Shift Sequences

| | | Relative |
|---|---|---|
| | | upstream |
| | | location to |
| Sequence | | gene start |
| ID No: | Sequence (5′-3′) | site |
| 10095 | CGGGGAAAGAATCATTCAACCAGCGG | 229 |
| 10096 | CGGTTTCTTCTCCATCGCGGGGGCG | 326 |
| 10097 | GGTTTCTTCTCCATCGCGGG | 327 |
| 10098 | GTTTCTTCTCCATCGCGGGG | 328 |
| 10099 | TTTCTTCTCCATCGCGGGGG | 329 |
| 10100 | TTCTTCTCCATCGCGGGGGC | 330 |
| 10101 | TCTTCTCCATCGCGGGGGCG | 331 |
| 10102 | CTTCTCCATCGCGGGGGCGG | 332 |
| 10103 | TTCTCCATCGCGGGGGCGGG | 333 |
| 10104 | TCTCCATCGCGGGGGCGGGG | 334 |
| 10105 | CTCCATCGCGGGGGCGGGGA | 335 |
| 10106 | TCCATCGCGGGGGCGGGGAT | 336 |
| 10107 | CCATCGCGGGGGCGGGGATT | 337 |
| 10108 | CATCGCGGGGGCGGGGATTT | 338 |
| 10109 | ATCGCGGGGGCGGGGATTTG | 339 |
| 10110 | TCGCGGGGGCGGGGATTTGG | 340 |
| 10111 | TCGGTTTCTTCTCCATCGCG | 325 |
| 10112 | CTCGGTTTCTTCTCCATCGC | 324 |
| 10113 | TCTCGGTTTCTTCTCCATCG | 323 |
| 10114 | GTCTCGGTTTCTTCTCCATC | 322 |
| 10115 | TGTCTCGGTTTCTTCTCCAT | 321 |
| 10116 | CTGTCTCGGTTTCTTCTCCA | 320 |
| 10117 | TCTGTCTCGGTTTCTTCTCC | 319 |
| 10118 | TTCTGTCTCGGTTTCTTCTC | 318 |
| 10119 | CTTCTGTCTCGGTTTCTTCT | 317 |
| 10120 | CCTTCTGTCTCGGTTTCTTC | 316 |
| 10121 | ACCTTCTGTCTCGGTTTCTT | 315 |
| 10122 | CACCTTCTGTCTCGGTTTCT | 314 |
| 10123 | GCACCTTCTGTCTCGGTTTC | 313 |
| 10124 | TGCACCTTCTGTCTCGGTTT | 312 |
| 10125 | CTGCACCTTCTGTCTCGGTT | 311 |
| 10126 | CCTGCACCTTCTGTCTCGGT | 310 |
| 10127 | CCCTGCACCTTCTGTCTCGG | 309 |
| 10128 | GCCCTGCACCTTCTGTCTCG | 308 |
| 10129 | CTGCTCCGATTCCGAGGGGGGTCTTCT | 412 |
| 10130 | TGCTCCGATTCCGAGGGGGG | 413 |
| 10131 | GCTCCGATTCCGAGGGGGGT | 414 |
| 10132 | CTCCGATTCCGAGGGGGGTC | 415 |
| 10133 | TCCGATTCCGAGGGGGGTCT | 416 |
| 10134 | CCGATTCCGAGGGGGGTCTT | 417 |
| 10135 | CGATTCCGAGGGGGGTCTTC | 418 |
| 10136 | GATTCCGAGGGGGGTCTTCT | 419 |
| 10137 | ATTCCGAGGGGGGTCTTCTG | 420 |
| 10138 | TTCCGAGGGGGGTCTTCTGG | 421 |
| 10139 | TCCGAGGGGGGTCTTCTGGG | 422 |
| 10140 | CCGAGGGGGGTCTTCTGGGC | 423 |
| 10141 | CGAGGGGGGTCTTCTGGGCC | 424 |
| 10142 | CCTGCTCCGATTCCGAGGGG | 411 |
| 10143 | CCCTGCTCCGATTCCGAGGG | 410 |
| 10144 | TCCCTGCTCCGATTCCGAGG | 409 |
| 10145 | CTCCCTGCTCCGATTCCGAG | 408 |
| 10146 | CCTCCCTGCTCCGATTCCGA | 407 |
| 10147 | TCCTCCCTGCTCCGATTCCG | 406 |
| 10148 | ATCCTCCCTGCTCCGATTCC | 405 |
| 10149 | CATCCTCCCTGCTCCGATTC | 404 |
| 10150 | CCATCCTCCCTGCTCCGATT | 403 |
| 10151 | CCCATCCTCCCTGCTCCGAT | 402 |
| 10152 | CCCCATCCTCCCTGCTCCGA | 401 |
| 10153 | TCCCCATCCTCCCTGCTCCG | 400 |
| 10154 | CTCCGTGTGGGGCTCTGGTCGGCAGCT | 1464 |
| 10155 | TCCGTGTGGGGCTCTGGTCG | 1465 |
| 10156 | CCGTGTGGGGCTCTGGTCGG | 1466 |
| 10157 | CGTGTGGGGCTCTGGTCGGC | 1467 |
| 10158 | GTGTGGGGCTCTGGTCGGCA | 1468 |
| 10159 | TGTGGGGCTCTGGTCGGCAG | 1469 |
| 10160 | GTGGGGCTCTGGTCGGCAGC | 1470 |
| 10161 | TGGGGCTCTGGTCGGCAGCT | 1471 |
| 10162 | GGGGCTCTGGTCGGCAGCTG | 1472 |
| 10163 | GGGCTCTGGTCGGCAGCTGG | 1473 |
| 10164 | GGCTCTGGTCGGCAGCTGGC | 1474 |
| 10165 | GCTCTGGTCGGCAGCTGGCT | 1475 |
| 10166 | CTCTGGTCGGCAGCTGGCTT | 1476 |
| 10167 | TCTGGTCGGCAGCTGGCTTT | 1477 |
| 10168 | CTGGTCGGCAGCTGGCTTTC | 1478 |
| 10169 | TGGTCGGCAGCTGGCTTTCA | 1479 |
| 10170 | GGTCGGCAGCTGGCTTTCAG | 1480 |
| 10171 | GTCGGCAGCTGGCTTTCAGA | 1481 |
| 10172 | TCGGCAGCTGGCTTTCAGAG | 1482 |
| 10173 | CGGCAGCTGGCTTTCAGAGC | 1483 |
| 10174 | CCTCCGTGTGGGGCTCTGGT | 1463 |
| 10175 | GCCTCCGTGTGGGGCTCTGG | 1462 |
| 10176 | TGCCTCCGTGTGGGGCTCTG | 1461 |
| 10177 | ATGCCTCCGTGTGGGGCTCT | 1460 |
| 10178 | GATGCCTCCGTGTGGGGCTC | 1459 |
| 10179 | AGATGCCTCCGTGTGGGGCT | 1458 |
| 10180 | CAGATGCCTCCGTGTGGGGC | 1457 |
| 10181 | GCAGATGCCTCCGTGTGGGG | 1456 |
| 10182 | TGCAGATGCCTCCGTGTGGG | 1455 |
| 10183 | GTGCAGATGCCTCCGTGTGG | 1454 |
| 10184 | GGTGCAGATGCCTCCGTGTG | 1453 |
| 10185 | GGGTGCAGATGCCTCCGTGT | 1452 |
| 10186 | AGGGTGCAGATGCCTCCGTG | 1451 |
| 10187 | GAGGGTGCAGATGCCTCCGT | 1450 |
| 10188 | CGAGGGTGCAGATGCCTCCG | 1449 |
| 10189 | TCGAGGGTGCAGATGCCTCC | 1448 |
| 10190 | ATCGAGGGTGCAGATGCCTC | 1447 |
| 10191 | CATCGAGGGTGCAGATGCCT | 1446 |
| 10192 | TCATCGAGGGTGCAGATGCC | 1445 |
| 10193 | TTCATCGAGGGTGCAGATGC | 1444 |
| 10194 | CTTCATCGAGGGTGCAGATG | 1443 |
| 10195 | GCTTCATCGAGGGTGCAGAT | 1442 |
| 10196 | GGCTTCATCGAGGGTGCAGA | 1441 |
| 10197 | GGGCTTCATCGAGGGTGCAG | 1440 |
| 10198 | TGGGCTTCATCGAGGGTGCA | 1439 |
| 10199 | TTGGGCTTCATCGAGGGTGC | 1438 |
| 10200 | ATTGGGCTTCATCGAGGGTG | 1437 |
| 10201 | TATTGGGCTTCATCGAGGGT | 1436 |
| 10202 | TTATTGGGCTTCATCGAGGG | 1435 |
| 10203 | TTTATTGGGCTTCATCGAGG | 1434 |
| 10204 | GTTTATTGGGCTTCATCGAG | 1433 |
| 10205 | GGTTTATTGGGCTTCATCGA | 1432 |
| 10206 | AGGTTTATTGGGCTTCATCG | 1431 |
| 10207 | CGCAGCCCCGTGGTACATCGAGTGCAGC | 2151 |
| 10208 | GCAGCCCCGTGGTACATCGA | 2152 |
| 10209 | CAGCCCCGTGGTACATCGAG | 2153 |
| 10210 | AGCCCCGTGGTACATCGAGT | 2154 |
| 10211 | GCCCCGTGGTACATCGAGTG | 2155 |
| 10212 | CCCCGTGGTACATCGAGTGC | 2156 |
| 10213 | CCCGTGGTACATCGAGTGCA | 2157 |
| 10214 | CCGTGGTACATCGAGTGCAG | 2158 |
| 10215 | CGTGGTACATCGAGTGCAGC | 2159 |
| 10216 | GTGGTACATCGAGTGCAGCC | 2160 |
| 10217 | TGGTACATCGAGTGCAGCCA | 2161 |
| 10218 | GGTACATCGAGTGCAGCCAG | 2162 |
| 10219 | GTACATCGAGTGCAGCCAGG | 2163 |
| 10220 | TACATCGAGTGCAGCCAGGG | 2164 |
| 10221 | ACATCGAGTGCAGCCAGGGT | 2165 |
| 10222 | CATCGAGTGCAGCCAGGGTT | 2166 |
| 10223 | ATCGAGTGCAGCCAGGGTTC | 2167 |
| 10224 | TCGAGTGCAGCCAGGGTTCC | 2168 |
| 10225 | CGAGTGCAGCCAGGGTTCCT | 2169 |
| 10226 | ACGCAGCCCCGTGGTACATC | 2150 |
| 10227 | AACGCAGCCCCGTGGTACAT | 2149 |
| 10228 | GAACGCAGCCCCGTGGTACA | 2148 |
| 10229 | GGAACGCAGCCCCGTGGTAC | 2147 |
| 10230 | TGGAACGCAGCCCCGTGGTA | 2146 |
| 10231 | CTGGAACGCAGCCCCGTGGT | 2145 |
| 10232 | GCTGGAACGCAGCCCCGTGG | 2144 |
| 10233 | AGCTGGAACGCAGCCCCGTG | 2143 |
| 10234 | GAGCTGGAACGCAGCCCCGT | 2142 |
| 10235 | TGAGCTGGAACGCAGCCCCG | 2141 |
| 10236 | GTGAGCTGGAACGCAGCCCC | 2140 |
| 10237 | GGTGAGCTGGAACGCAGCCC | 2139 |
| 10238 | GGGTGAGCTGGAACGCAGCC | 2138 |
| 10239 | TGGGTGAGCTGGAACGCAGC | 2137 |
| 10240 | CTGGGTGAGCTGGAACGCAG | 2136 |
| 10241 | CCTGGGTGAGCTGGAACGCA | 2135 |
| 10242 | CCCTGGGTGAGCTGGAACGC | 2134 |
| 10243 | TCCCTGGGTGAGCTGGAACG | 2133 |

Hot Zones (Relative upstream location to gene start site)
168-450
1430-1520
2150-2240

### Examples

[0456] In FIG. 62, In MCF7 (human mammary breast cell line), TNF1 (312) produced statistically significant (P<0.05) inhibition at 10 μM compared to the untreated and negative control values. The TNFα sequence TNF1 (312) fits the independent and dependent DNAi motif claims.

[0457] The secondary structure for TNF1 (312) is shown in FIG. 63.

Genetic Code (5′ Upstream Region)

(SEQ ID NO: 11982)

CTCACTGTCTCTCTCTCTCTCTCTCTTTCTCTGCAGGTTCTCCCCATGAC
ACCACCTGAACGTCTCTTCCTCCCAAGGGTGTGTGGCACCACCCTACACC
TCCTCCTTCTGGGGCTGCTGCTGGTTCTGCTGCCTGGGGCCCAGGTGAGG
CAGCAGGAGAATGGGGGCTGCTGGGGTGGCTCAGCCAAACCTTGAGCCCT
AGAGCCCCCCTCAACTCTGTTCTCCCCTAGGGGCTCCCTGGTGTTGGCCT
CACACCTTCAGCTGCCCAGACTGCCCGTCAGCACCCCAAGATGCATCTTG
CCCACAGCACCCTCAAACCTGCTGCTCACCTCATTGGTAAACATCCACCT
GACCTCCCAGACATGTCCCCACCAGCTCTCCTCCTACCCCTGCCTCAGGA
ACCCAAGCATCCACCCCTCTCCCCCAACTTCCCCCACGCTAAAAAAAACA
GAGGGAGCCCACTCCTATGCCTCCCCCTGCCATCCCCCAGGAACTCAGTT
GTTCAGTGCCCACTTCCTCAGGGATTGAGACCTCTGATCCAGACCCCTGA
TCTCCCACCCCCATCCCCTATGGCTCTTCCTAGGAGACCCCAGCAAGCAG
AACTCACTGCTCTGGAGAGCAAACACGGACCGTGCCTTCCTCCAGGATGG
TTTCTCCTTGAGCAACAATTCTCTCCTGGTCCCCACCAGTGGCATCTACT
TCGTCTACTCCCAGGTGGTCTTCTCTGGGAAAGCCTACTCTCCCAAGGCC
ACCTCCTCCCCACTCTACCTGGCCCATGAGGTCCAGCTCTTCTCCTCCCA
GTACCCCTTCCATGTGCCTCTCCTCAGCTCCCAGAAGATGGTGTATCCAG
GGCTGCAGGAACCCTGGCTGCACTCGATGTACCACGGGGCTGCGTTCCAG
CTCACCCAGGGAGACCAGCTATCCACCCACACAGATGGCATCCCCCACCT
AGTCCTCAGCCCTAGTACTGTCTTCTTTGGAGCCTTCGCTCTGTAGAACT
TGGAAAAATCCAGAAAGAAAAAATAATTGATTTCAAGACCTTCTCCCCAT
TCTGCCTCCATTCTGACCATTTCAGGGGTCGTCACCACCTCTCCTTTGGC
CATTCCAACAGCTCAAGTCTTCCCTGATCAAGTCACCGGAGCTTTCAAAG
AAGGAATTCTAGGCATCCCAGGGGACCACACCTCCCTGAACCATCCCTGA
TGTCTGTCTGGCTGAGGATTTCAAGCCTGCCTAGGAATTCCCAGCCCAAA
GCTGTTGGTCTGTCCCACCAGCTAGGTGGGGCCTAGATCCACACACAGAG
GAAGAGCAGGCACATGGAGGAGCTTGGGGGATGACTAGAGGCAGGGAGGG
GACTATTTATGAAGGCAAAAAAATTAAATTATTTATTTATGGAGGATGGA
GAGAGGGGAATAATAGAAGAACATCCAAGGAGAAACAGAGACAGGCCCAA
GAGATGAAGAGTGAGAGGGCATGCGCACAAGGCTGACCAAGAGAGAAAGA
AGTAGGCATGAGGGATCACAGGGCCCCAGAAGGCAGGGAAAGGCTCTGAA
AGCCAGCTGCCGACCAGAGCCCCACACGGAGGCATCTGCACCCTCGATGA
AGCCCAATAAACCTCTTTTCTCTGAAATGCTGTCTGCTTGTGTGTGTGTG
TCTGGGAGTGAGAACTTCCCAGTCTATCTAAGGAATGGAGGGAGGGACAG
AGGGCTCAAAGGGAGCAAGAGCTGTGGGGAGAACAAAAGGATAAGGGCTC
AGAGAGCTTCAGGGATATGTGATGGACTCACCAGGTGAGGCCGCCAGACT
GCTGCAGGGGAAGCAAAGGAGAAGCTGAGAAGATGAAGGAAAAGTCAGGG
TCTGGAGGGGCGGGGGTCAGGGAGCTCCTGGGAGATATGGCCACATGTAG
CGGCTCTGAGGAATGGGTTACAGGAGACCTCTGGGGAGATGTGACCACAG
CAATGGGTAGGAGAATGTCCAGGGCTATGGAAGTCGAGTATGGGGACCCC
CCCTTAACGAAGACAGGGCCATGTAGAGGGCCCCAGGGAGTGAAAGAGCC
TCCAGGACCTCCAGGTATGGAATACAGGGGACGTTTAAGAAGATATGGCC
ACACACTGGGGCCCTGAGAAGTGAGAGCTTCATGAAAAAAATCAGGGACC
CCAGAGTTCCTTGGAAGCCAAGACTGAAACCAGCATTATGAGTCTCCGGG
TCAGAATGAAAGAAGAAGGCCTGCCCCAGTGGGGTCTGTGAATTCCCGGG
GGTGATTTCACTCCCCGGGGCTGTCCCAGGCTTGTCCCTGCTACCCCCAC
CCAGCCTTTCCTGAGGCCTCAAGCCTGCCACCAAGCCCCCAGCTCCTTCT
CCCCGCAGGGACCCAAACACAGGCCTCAGGACTCAACACAGCTTTTCCCT
CCAACCCCGTTTTCTCTCCCTCAAGGACTCAGCTTTCTGAAGCCCCTCCC
AGTTCTAGTTCTATCTTTTTCCTGCATCCTGTCTGGAAGTTAGAAGGAAA
CAGACCACAGACCTGGTCCCCAAAAGAAATGGAGGCAATAGGTTTTGAGG
GGCATGGGGACGGGGTTCAGCCTCCAGGGTCCTACACACAAATCAGTCAG
TGGCCCAGAAGACCCCCCTCGGAATCGGAGCAGGGAGGATGGGGAGTGTG
AGGGGTATCCTTGATGCTTGTGTGTCCCCAACTTTCCAAATCCCCGCCCC
CGCGATGGAGAAGAAACCGAGACAGAAGGTGCAGGGCCCACTACCGCTTC
CTCCAGATGAGCTCATGGGTTTCTCCACCAAGGAAGTTTTCCGCTGGTTG
AATGATTCTTTCCCCGCCCTCCTCTCGCCCCAGGGACATATAAAGGCAGT
TGTTGGCACACCCAGCCAGCAGACGCTCCCTCAGCAAGGACAGCAGAGGA
CCAGCTAAGAGGGAGAGAAGCAACTACAGACCCCCCCTGAAAACAACCCT
CAGACGCCACATCCCCTGACAAGCTGCCAGGCAGGTTCTCTTCCTCTCAC
ATACTGACCCACGGCTCCACCCTCTCTCCCCTGGAAAGGACACCATG

[0458] ITGA4

[0459] Integrins are ubiquitously expressed adhesion molecules. They are cell-surface receptors that exist as heterodimers of alpha and beta subunits. ITGA4 encodes an alpha 4 chain. Unlike other integrin alpha chains, alpha 4 neither contains an I-domain, nor undergoes disulfide-linked cleavage. Alpha 4 chain associates with either beta 1 chain or beta 7 chain. At physiological conditions, integrins are highly glycosylated and contain a Ca2+ or Mg2+ ion, which is essential for ligand binding. Integrin receptors are critical for cell attachment to the extracellular matrix (ECM) and this is mediated through integrin-fibronectin, -vitronectin, -collagen and -laminin interactions. Intracellularly, integrins form adhesion complexes with proteins including talin, vinculin, paxillin and alpha-actinin. They also regulate kinases, such as focal adhesion kinase and Src family kinases, to mediate attachment to the actin cytoskeleton. Integrins also have a significant role in cell signaling and can activate protein kinases involved in the regulation of cell growth, division, survival, differentiation, migration and apoptosis. Glycoprotein II/IIIb (alphaIIbeta3) is an integrin receptor found on the surface of platelets. It is involved in the cross-linking of platelets with fibrin, and so has a vital role in blood clot formation.

[0460] Protein: ITGA4 Gene: ITGA4 (CD49D) (Homo sapiens, chromosome 2, 182321619-182402474 [NCBI Reference Sequence: NC_{—}000002.11]; start site location: 182322383; strand: positive)

Gene Identification

| | |
|---|---|
| GeneID | 3676 |
| HGNC | 6140 |
| MIM | 192975 |

Targeted Sequences

| | | | Relative |
|---|---|---|---|
| | | | upstream |
| | | | location |
| Se- | | | to gene |
| quence | Design | | start |
| ID No: | ID | Sequence (5′-3′) | site |
| 10244 | | GCGCTCTCGGTGGGGAACATTCAACAC | 1 |
| 10252 | | CGGGATGCGACGGTTGGCCAACGG | 54 |
| 10278 | | CGCAGCGTGTCCGGCGCCAGCGGGC | 102 |
| 10299 | | CGGCCCACCGCGGGCGGAGCGTTCG | 160 |
| 10449 | | CGCGCACTCGCCCGGCCCCACTCCCG | 201 |
| 10599 | | CGCCAGCCGGGAGCTTCGGGTGCTCGCG | 235 |
| 10749 | | CGGGTACGGGCCGCTGGGTGGGGTCCCG | 272 |
| 10899 | | GTGCGGAGGCGCAGGGCCGGGCTCCG | 306 |
| 10900 | | CTACGCGCGGCTGCAGGGGGCGC | 339 |
| 10938 | | CTGCGCAGGACTCGCGTCCTGGCCCG | 375 |
| 11009 | | CCCGCAGAGCGCGGGATGGCTC | 411 |
| 11080 | | CGGACCTGATGGGGCACGGGCTTCCCC | 448 |
| 11117 | | CGGTGGTTGGGGCCTAGAAGCG | 481 |
| 11154 | | CGCGCCCCTCGCTGTGACCGCCCAGCCCG | 524 |
| 11203 | | CGGGGAGTGGGACTGCGGCGGGGAGCCG | 580 |
| 11208 | | ACTCGCCGAAGGCCCCTGGGGAAC | 718 |
| 11222 | | CGGGCTGCATGCGTGAGCAGG | 840 |
| 11252 | | CGGCAGGCGGTTTAGGCTGTGGCTG | 885 |
| 11278 | | CCGATTCGGATTGCTCCAGCTGG | 962 |
| 11289 | | CGCACCCACTCAGTTGCCACGGG | 1008 |
| 11327 | | CGGAGACCCACAACGCAACACACC | 1099 |

Target Shift Sequences

| | | Relative |
|---|---|---|
| | | upstream |
| | | location to |
| Sequence | | gene start |
| ID No: | Sequence (5′-3′) | site |
| 10244 | GCGCTCTCGGTGGGGAACATTCAACAC | 1 |
| 10245 | CGCTCTCGGTGGGGAACATT | 2 |
| 10246 | GCTCTCGGTGGGGAACATTC | 3 |
| 10247 | CTCTCGGTGGGGAACATTCA | 4 |
| 10248 | TCTCGGTGGGGAACATTCAA | 5 |
| 10249 | CTCGGTGGGGAACATTCAAC | 6 |
| 10250 | TCGGTGGGGAACATTCAACA | 7 |
| 10251 | CGGTGGGGAACATTCAACAC | 8 |
| 10252 | CGGGATGCGACGGTTGGCCAACGG | 54 |
| 10253 | GGGATGCGACGGTTGGCCAA | 55 |
| 10254 | GGATGCGACGGTTGGCCAAC | 56 |
| 10255 | GATGCGACGGTTGGCCAACG | 57 |
| 10256 | ATGCGACGGTTGGCCAACGG | 58 |
| 10257 | TGCGACGGTTGGCCAACGGG | 59 |
| 10258 | GCGACGGTTGGCCAACGGGG | 60 |
| 10259 | CGACGGTTGGCCAACGGGGA | 61 |
| 10260 | ACGGGATGCGACGGTTGGCC | 53 |
| 10261 | CACGGGATGCGACGGTTGGC | 52 |
| 10262 | GCACGGGATGCGACGGTTGG | 51 |
| 10263 | TGCACGGGATGCGACGGTTG | 50 |
| 10264 | TTGCACGGGATGCGACGGTT | 49 |
| 10265 | GTTGCACGGGATGCGACGGT | 48 |
| 10266 | AGTTGCACGGGATGCGACGG | 47 |
| 10267 | AAGTTGCACGGGATGCGACG | 46 |
| 10268 | AAAGTTGCACGGGATGCGAC | 45 |
| 10269 | CAAAGTTGCACGGGATGCGA | 44 |
| 10270 | CCAAAGTTGCACGGGATGCG | 43 |
| 10271 | CCCAAAGTTGCACGGGATGC | 42 |
| 10272 | CCCCAAAGTTGCACGGGATG | 41 |
| 10273 | ACCCCAAAGTTGCACGGGAT | 40 |
| 10274 | TACCCCAAAGTTGCACGGGA | 39 |
| 10275 | CTACCCCAAAGTTGCACGGG | 38 |
| 10276 | ACTACCCCAAAGTTGCACGG | 37 |
| 10277 | CACTACCCCAAAGTTGCACG | 36 |
| 10278 | CGCAGCGTGTCCGGCGCCAGCGGGC | 102 |
| 10279 | GCAGCGTGTCCGGCGCCAGC | 103 |
| 10280 | CAGCGTGTCCGGCGCCAGCG | 104 |
| 10281 | AGCGTGTCCGGCGCCAGCGG | 105 |
| 10282 | GCGTGTCCGGCGCCAGCGGG | 106 |
| 10283 | CGTGTCCGGCGCCAGCGGGC | 107 |
| 10284 | GTGTCCGGCGCCAGCGGGCT | 108 |
| 10285 | TGTCCGGCGCCAGCGGGCTA | 109 |
| 10286 | GTCCGGCGCCAGCGGGCTAA | 110 |
| 10287 | TCCGGCGCCAGCGGGCTAAA | 111 |
| 10288 | CCGGCGCCAGCGGGCTAAAG | 112 |
| 10289 | CGGCGCCAGCGGGCTAAAGG | 113 |
| 10290 | GCGCAGCGTGTCCGGCGCCA | 101 |
| 10291 | GGCGCAGCGTGTCCGGCGCC | 100 |
| 10292 | AGGCGCAGCGTGTCCGGCGC | 99 |
| 10293 | GAGGCGCAGCGTGTCCGGCG | 98 |
| 10294 | TGAGGCGCAGCGTGTCCGGC | 97 |
| 10295 | ATGAGGCGCAGCGTGTCCGG | 96 |
| 10296 | GATGAGGCGCAGCGTGTCCG | 95 |
| 10297 | AGATGAGGCGCAGCGTGTCC | 94 |
| 10298 | GAGATGAGGCGCAGCGTGTC | 93 |
| 10299 | CGGCCCACCGCGGGCGGAGCGTTCG | 160 |
| 10300 | GGCCCACCGCGGGCGGAGCG | 161 |
| 10301 | GCCCACCGCGGGCGGAGCGT | 162 |
| 10302 | CCCACCGCGGGCGGAGCGTT | 163 |
| 10303 | CCACCGCGGGCGGAGCGTTC | 164 |
| 10304 | CACCGCGGGCGGAGCGTTCG | 165 |
| 10305 | ACCGCGGGCGGAGCGTTCGG | 166 |
| 10306 | CCGCGGGCGGAGCGTTCGGG | 167 |
| 10307 | CGCGGGCGGAGCGTTCGGGC | 168 |
| 10308 | GCGGGCGGAGCGTTCGGGCC | 169 |
| 10309 | CGGGCGGAGCGTTCGGGCCG | 170 |
| 10310 | GGGCGGAGCGTTCGGGCCGG | 171 |
| 10311 | GGCGGAGCGTTCGGGCCGGC | 172 |
| 10312 | GCGGAGCGTTCGGGCCGGCC | 173 |
| 10313 | CGGAGCGTTCGGGCCGGCCT | 174 |
| 10314 | GGAGCGTTCGGGCCGGCCTG | 175 |
| 10315 | GAGCGTTCGGGCCGGCCTGG | 176 |
| 10316 | AGCGTTCGGGCCGGCCTGGG | 177 |
| 10317 | GCGTTCGGGCCGGCCTGGGA | 178 |
| 10318 | CGTTCGGGCCGGCCTGGGAT | 179 |
| 10319 | GTTCGGGCCGGCCTGGGATG | 180 |
| 10320 | TTCGGGCCGGCCTGGGATGC | 181 |
| 10321 | TCGGGCCGGCCTGGGATGCC | 182 |
| 10322 | CGGGCCGGCCTGGGATGCCG | 183 |
| 10323 | GGGCCGGCCTGGGATGCCGC | 184 |
| 10324 | GGCCGGCCTGGGATGCCGCG | 185 |
| 10325 | GCCGGCCTGGGATGCCGCGC | 186 |
| 10326 | CCGGCCTGGGATGCCGCGCA | 187 |
| 10327 | CGGCCTGGGATGCCGCGCAC | 188 |
| 10328 | GGCCTGGGATGCCGCGCACT | 189 |
| 10329 | GCCTGGGATGCCGCGCACTC | 190 |
| 10330 | CCTGGGATGCCGCGCACTCG | 191 |
| 10331 | CTGGGATGCCGCGCACTCGC | 192 |
| 10332 | TGGGATGCCGCGCACTCGCC | 193 |
| 10333 | GGGATGCCGCGCACTCGCCC | 194 |
| 10334 | GGATGCCGCGCACTCGCCCG | 195 |
| 10335 | GATGCCGCGCACTCGCCCGG | 196 |
| 10336 | ATGCCGCGCACTCGCCCGGC | 197 |
| 10337 | TGCCGCGCACTCGCCCGGCC | 198 |
| 10338 | GCCGCGCACTCGCCCGGCCC | 199 |
| 10339 | CCGCGCACTCGCCCGGCCCC | 200 |
| 10340 | CGCGCACTCGCCCGGCCCCA | 201 |
| 10341 | GCGCACTCGCCCGGCCCCAC | 202 |
| 10342 | CGCACTCGCCCGGCCCCACT | 203 |
| 10343 | GCACTCGCCCGGCCCCACTC | 204 |
| 10344 | CACTCGCCCGGCCCCACTCC | 205 |
| 10345 | ACTCGCCCGGCCCCACTCCC | 206 |
| 10346 | CTCGCCCGGCCCCACTCCCG | 207 |
| 10347 | TCGCCCGGCCCCACTCCCGG | 208 |
| 10348 | CGCCCGGCCCCACTCCCGGT | 209 |
| 10349 | GCCCGGCCCCACTCCCGGTT | 210 |
| 10350 | CCCGGCCCCACTCCCGGTTT | 211 |
| 10351 | CCGGCCCCACTCCCGGTTTC | 212 |
| 10352 | CGGCCCCACTCCCGGTTTCT | 213 |
| 10353 | GGCCCCACTCCCGGTTTCTG | 214 |
| 10354 | GCCCCACTCCCGGTTTCTGC | 215 |
| 10355 | CCCCACTCCCGGTTTCTGCC | 216 |
| 10356 | CCCACTCCCGGTTTCTGCCG | 217 |
| 10357 | CCACTCCCGGTTTCTGCCGC | 218 |
| 10358 | CACTCCCGGTTTCTGCCGCC | 219 |
| 10359 | ACTCCCGGTTTCTGCCGCCA | 220 |
| 10360 | CTCCCGGTTTCTGCCGCCAG | 221 |
| 10361 | TCCCGGTTTCTGCCGCCAGC | 222 |
| 10362 | CCCGGTTTCTGCCGCCAGCC | 223 |
| 10363 | CCGGTTTCTGCCGCCAGCCG | 224 |
| 10364 | CGGTTTCTGCCGCCAGCCGG | 225 |
| 10365 | GGTTTCTGCCGCCAGCCGGG | 226 |
| 10366 | GTTTCTGCCGCCAGCCGGGA | 227 |
| 10367 | TTTCTGCCGCCAGCCGGGAG | 228 |
| 10368 | TTCTGCCGCCAGCCGGGAGC | 229 |
| 10369 | TCTGCCGCCAGCCGGGAGCT | 230 |
| 10370 | CTGCCGCCAGCCGGGAGCTT | 231 |
| 10371 | TGCCGCCAGCCGGGAGCTTC | 232 |
| 10372 | GCCGCCAGCCGGGAGCTTCG | 233 |
| 10373 | CCGCCAGCCGGGAGCTTCGG | 234 |
| 10374 | CGCCAGCCGGGAGCTTCGGG | 235 |
| 10375 | GCCAGCCGGGAGCTTCGGGT | 236 |
| 10376 | CCAGCCGGGAGCTTCGGGTG | 237 |
| 10377 | CAGCCGGGAGCTTCGGGTGC | 238 |
| 10378 | AGCCGGGAGCTTCGGGTGCT | 239 |
| 10379 | GCCGGGAGCTTCGGGTGCTC | 240 |
| 10380 | CCGGGAGCTTCGGGTGCTCG | 241 |
| 10381 | CGGGAGCTTCGGGTGCTCGC | 242 |
| 10382 | GGGAGCTTCGGGTGCTCGCG | 243 |
| 10383 | GGAGCTTCGGGTGCTCGCGC | 244 |
| 10384 | GAGCTTCGGGTGCTCGCGCT | 245 |
| 10385 | AGCTTCGGGTGCTCGCGCTG | 246 |
| 10386 | GCTTCGGGTGCTCGCGCTGC | 247 |
| 10387 | CTTCGGGTGCTCGCGCTGCT | 248 |
| 10388 | TTCGGGTGCTCGCGCTGCTT | 249 |
| 10389 | TCGGGTGCTCGCGCTGCTTC | 250 |
| 10390 | CGGGTGCTCGCGCTGCTTCT | 251 |
| 10391 | GGGTGCTCGCGCTGCTTCTC | 252 |
| 10392 | GGTGCTCGCGCTGCTTCTCC | 253 |
| 10393 | GTGCTCGCGCTGCTTCTCCG | 254 |
| 10394 | TGCTCGCGCTGCTTCTCCGG | 255 |
| 10395 | GCTCGCGCTGCTTCTCCGGG | 256 |
| 10396 | CTCGCGCTGCTTCTCCGGGT | 257 |
| 10397 | TCGCGCTGCTTCTCCGGGTA | 258 |
| 10398 | CGCGCTGCTTCTCCGGGTAC | 259 |
| 10399 | GCGCTGCTTCTCCGGGTACG | 260 |
| 10400 | CGCTGCTTCTCCGGGTACGG | 261 |
| 10401 | GCTGCTTCTCCGGGTACGGG | 262 |
| 10402 | CTGCTTCTCCGGGTACGGGC | 263 |
| 10403 | TGCTTCTCCGGGTACGGGCC | 264 |
| 10404 | GCTTCTCCGGGTACGGGCCG | 265 |
| 10405 | CTTCTCCGGGTACGGGCCGC | 266 |
| 10406 | TTCTCCGGGTACGGGCCGCT | 267 |
| 10407 | TCTCCGGGTACGGGCCGCTG | 268 |
| 10408 | CTCCGGGTACGGGCCGCTGG | 269 |
| 10409 | TCCGGGTACGGGCCGCTGGG | 270 |
| 10410 | CCGGGTACGGGCCGCTGGGT | 271 |
| 10411 | CGGGTACGGGCCGCTGGGTG | 272 |
| 10412 | GGGTACGGGCCGCTGGGTGG | 273 |
| 10413 | GGTACGGGCCGCTGGGTGGG | 274 |
| 10414 | GTACGGGCCGCTGGGTGGGG | 275 |
| 10415 | TACGGGCCGCTGGGTGGGGT | 276 |
| 10416 | ACGGGCCGCTGGGTGGGGTC | 277 |
| 10417 | CGGGCCGCTGGGTGGGGTCC | 278 |
| 10418 | GGGCCGCTGGGTGGGGTCCC | 279 |
| 10419 | GGCCGCTGGGTGGGGTCCCG | 280 |
| 10420 | GCCGCTGGGTGGGGTCCCGG | 281 |
| 10421 | CCGCTGGGTGGGGTCCCGGG | 282 |
| 10422 | CGCTGGGTGGGGTCCCGGGC | 283 |
| 10423 | GCTGGGTGGGGTCCCGGGCG | 284 |
| 10424 | CTGGGTGGGGTCCCGGGCGT | 285 |
| 10425 | TGGGTGGGGTCCCGGGCGTG | 286 |
| 10426 | GGGTGGGGTCCCGGGCGTGG | 287 |
| 10427 | GGTGGGGTCCCGGGCGTGGT | 288 |
| 10428 | GTGGGGTCCCGGGCGTGGTG | 289 |
| 10429 | TGGGGTCCCGGGCGTGGTGC | 290 |
| 10430 | GGGGTCCCGGGCGTGGTGCG | 291 |
| 10431 | GGGTCCCGGGCGTGGTGCGG | 292 |
| 10432 | GGTCCCGGGCGTGGTGCGGA | 293 |
| 10433 | GTCCCGGGCGTGGTGCGGAG | 294 |
| 10434 | TCCCGGGCGTGGTGCGGAGG | 295 |
| 10435 | CCCGGGCGTGGTGCGGAGGC | 296 |
| 10436 | CCGGGCGTGGTGCGGAGGCG | 297 |
| 10437 | CGGGCGTGGTGCGGAGGCGC | 298 |
| 10438 | TCGGCCCACCGCGGGCGGAG | 159 |
| 10439 | GTCGGCCCACCGCGGGCGGA | 158 |
| 10440 | AGTCGGCCCACCGCGGGCGG | 157 |
| 10441 | AAGTCGGCCCACCGCGGGCG | 156 |
| 10442 | GAAGTCGGCCCACCGCGGGC | 155 |
| 10443 | GGAAGTCGGCCCACCGCGGG | 154 |
| 10444 | GGGAAGTCGGCCCACCGCGG | 153 |
| 10445 | GGGGAAGTCGGCCCACCGCG | 152 |
| 10446 | AGGGGAAGTCGGCCCACCGC | 151 |
| 10447 | GAGGGGAAGTCGGCCCACCG | 150 |
| 10448 | GGAGGGGAAGTCGGCCCACC | 149 |
| 10449 | CGCGCACTCGCCCGGCCCCACTCCCG | 201 |
| 10450 | GCGCACTCGCCCGGCCCCAC | 202 |
| 10451 | CGCACTCGCCCGGCCCCACT | 203 |
| 10452 | GCACTCGCCCGGCCCCACTC | 204 |
| 10453 | CACTCGCCCGGCCCCACTCC | 205 |
| 10454 | ACTCGCCCGGCCCCACTCCC | 206 |
| 10455 | CTCGCCCGGCCCCACTCCCG | 207 |
| 10456 | TCGCCCGGCCCCACTCCCGG | 208 |
| 10457 | CGCCCGGCCCCACTCCCGGT | 209 |
| 10458 | GCCCGGCCCCACTCCCGGTT | 210 |
| 10459 | CCCGGCCCCACTCCCGGTTT | 211 |
| 10460 | CCGGCCCCACTCCCGGTTTC | 212 |
| 10461 | CGGCCCCACTCCCGGTTTCT | 213 |
| 10462 | GGCCCCACTCCCGGTTTCTG | 214 |
| 10463 | GCCCCACTCCCGGTTTCTGC | 215 |
| 10464 | CCCCACTCCCGGTTTCTGCC | 216 |
| 10465 | CCCACTCCCGGTTTCTGCCG | 217 |
| 10466 | CCACTCCCGGTTTCTGCCGC | 218 |
| 10467 | CACTCCCGGTTTCTGCCGCC | 219 |
| 10468 | ACTCCCGGTTTCTGCCGCCA | 220 |
| 10469 | CTCCCGGTTTCTGCCGCCAG | 221 |
| 10470 | TCCCGGTTTCTGCCGCCAGC | 222 |
| 10471 | CCCGGTTTCTGCCGCCAGCC | 223 |
| 10472 | CCGGTTTCTGCCGCCAGCCG | 224 |
| 10473 | CGGTTTCTGCCGCCAGCCGG | 225 |
| 10474 | GGTTTCTGCCGCCAGCCGGG | 226 |
| 10475 | GTTTCTGCCGCCAGCCGGGA | 227 |
| 10476 | TTTCTGCCGCCAGCCGGGAG | 228 |
| 10477 | TTCTGCCGCCAGCCGGGAGC | 229 |
| 10478 | TCTGCCGCCAGCCGGGAGCT | 230 |
| 10479 | CTGCCGCCAGCCGGGAGCTT | 231 |
| 10480 | TGCCGCCAGCCGGGAGCTTC | 232 |
| 10481 | GCCGCCAGCCGGGAGCTTCG | 233 |
| 10482 | CCGCCAGCCGGGAGCTTCGG | 234 |
| 10483 | CGCCAGCCGGGAGCTTCGGG | 235 |
| 10484 | GCCAGCCGGGAGCTTCGGGT | 236 |
| 10485 | CCAGCCGGGAGCTTCGGGTG | 237 |
| 10486 | CAGCCGGGAGCTTCGGGTGC | 238 |
| 10487 | AGCCGGGAGCTTCGGGTGCT | 239 |
| 10488 | GCCGGGAGCTTCGGGTGCTC | 240 |
| 10489 | CCGGGAGCTTCGGGTGCTCG | 241 |
| 10490 | CGGGAGCTTCGGGTGCTCGC | 242 |
| 10491 | GGGAGCTTCGGGTGCTCGCG | 243 |
| 10492 | GGAGCTTCGGGTGCTCGCGC | 244 |
| 10493 | GAGCTTCGGGTGCTCGCGCT | 245 |
| 10494 | AGCTTCGGGTGCTCGCGCTG | 246 |
| 10495 | GCTTCGGGTGCTCGCGCTGC | 247 |
| 10496 | CTTCGGGTGCTCGCGCTGCT | 248 |
| 10497 | TTCGGGTGCTCGCGCTGCTT | 249 |
| 10498 | TCGGGTGCTCGCGCTGCTTC | 250 |
| 10499 | CGGGTGCTCGCGCTGCTTCT | 251 |
| 10500 | GGGTGCTCGCGCTGCTTCTC | 252 |
| 10501 | GGTGCTCGCGCTGCTTCTCC | 253 |
| 10502 | GTGCTCGCGCTGCTTCTCCG | 254 |
| 10503 | TGCTCGCGCTGCTTCTCCGG | 255 |
| 10504 | GCTCGCGCTGCTTCTCCGGG | 256 |
| 10505 | CTCGCGCTGCTTCTCCGGGT | 257 |
| 10506 | TCGCGCTGCTTCTCCGGGTA | 258 |
| 10507 | CGCGCTGCTTCTCCGGGTAC | 259 |
| 10508 | GCGCTGCTTCTCCGGGTACG | 260 |
| 10509 | CGCTGCTTCTCCGGGTACGG | 261 |
| 10510 | GCTGCTTCTCCGGGTACGGG | 262 |
| 10511 | CTGCTTCTCCGGGTACGGGC | 263 |
| 10512 | TGCTTCTCCGGGTACGGGCC | 264 |
| 10513 | GCTTCTCCGGGTACGGGCCG | 265 |
| 10514 | CTTCTCCGGGTACGGGCCGC | 266 |
| 10515 | TTCTCCGGGTACGGGCCGCT | 267 |
| 10516 | TCTCCGGGTACGGGCCGCTG | 268 |
| 10517 | CTCCGGGTACGGGCCGCTGG | 269 |
| 10518 | TCCGGGTACGGGCCGCTGGG | 270 |
| 10519 | CCGGGTACGGGCCGCTGGGT | 271 |
| 10520 | CGGGTACGGGCCGCTGGGTG | 272 |
| 10521 | GGGTACGGGCCGCTGGGTGG | 273 |
| 10522 | GGTACGGGCCGCTGGGTGGG | 274 |
| 10523 | GTACGGGCCGCTGGGTGGGG | 275 |
| 10524 | TACGGGCCGCTGGGTGGGGT | 276 |
| 10525 | ACGGGCCGCTGGGTGGGGTC | 277 |
| 10526 | CGGGCCGCTGGGTGGGGTCC | 278 |
| 10527 | GGGCCGCTGGGTGGGGTCCC | 279 |
| 10528 | GGCCGCTGGGTGGGGTCCCG | 280 |
| 10529 | GCCGCTGGGTGGGGTCCCGG | 281 |
| 10530 | CCGCTGGGTGGGGTCCCGGG | 282 |
| 10531 | CGCTGGGTGGGGTCCCGGGC | 283 |
| 10532 | GCTGGGTGGGGTCCCGGGCG | 284 |
| 10533 | CTGGGTGGGGTCCCGGGCGT | 285 |
| 10534 | TGGGTGGGGTCCCGGGCGTG | 286 |
| 10535 | GGGTGGGGTCCCGGGCGTGG | 287 |
| 10536 | GGTGGGGTCCCGGGCGTGGT | 288 |
| 10537 | GTGGGGTCCCGGGCGTGGTG | 289 |
| 10538 | TGGGGTCCCGGGCGTGGTGC | 290 |
| 10539 | GGGGTCCCGGGCGTGGTGCG | 291 |
| 10540 | GGGTCCCGGGCGTGGTGCGG | 292 |
| 10541 | GGTCCCGGGCGTGGTGCGGA | 293 |
| 10542 | GTCCCGGGCGTGGTGCGGAG | 294 |
| 10543 | TCCCGGGCGTGGTGCGGAGG | 295 |
| 10544 | CCCGGGCGTGGTGCGGAGGC | 296 |
| 10545 | CCGGGCGTGGTGCGGAGGCG | 297 |
| 10546 | CGGGCGTGGTGCGGAGGCGC | 298 |
| 10547 | CCGCGCACTCGCCCGGCCCC | 200 |
| 10548 | GCCGCGCACTCGCCCGGCCC | 199 |
| 10549 | TGCCGCGCACTCGCCCGGCC | 198 |
| 10550 | ATGCCGCGCACTCGCCCGGC | 197 |
| 10551 | GATGCCGCGCACTCGCCCGG | 196 |
| 10552 | GGATGCCGCGCACTCGCCCG | 195 |
| 10553 | GGGATGCCGCGCACTCGCCC | 194 |
| 10554 | TGGGATGCCGCGCACTCGCC | 193 |
| 10555 | CTGGGATGCCGCGCACTCGC | 192 |
| 10556 | CCTGGGATGCCGCGCACTCG | 191 |
| 10557 | GCCTGGGATGCCGCGCACTC | 190 |
| 10558 | GGCCTGGGATGCCGCGCACT | 189 |
| 10559 | CGGCCTGGGATGCCGCGCAC | 188 |
| 10560 | CCGGCCTGGGATGCCGCGCA | 187 |
| 10561 | GCCGGCCTGGGATGCCGCGC | 186 |
| 10562 | GGCCGGCCTGGGATGCCGCG | 185 |
| 10563 | GGGCCGGCCTGGGATGCCGC | 184 |
| 10564 | CGGGCCGGCCTGGGATGCCG | 183 |
| 10565 | TCGGGCCGGCCTGGGATGCC | 182 |
| 10566 | TTCGGGCCGGCCTGGGATGC | 181 |
| 10567 | GTTCGGGCCGGCCTGGGATG | 180 |
| 10568 | CGTTCGGGCCGGCCTGGGAT | 179 |
| 10569 | GCGTTCGGGCCGGCCTGGGA | 178 |
| 10570 | AGCGTTCGGGCCGGCCTGGG | 177 |
| 10571 | GAGCGTTCGGGCCGGCCTGG | 176 |
| 10572 | GGAGCGTTCGGGCCGGCCTG | 175 |
| 10573 | CGGAGCGTTCGGGCCGGCCT | 174 |
| 10574 | GCGGAGCGTTCGGGCCGGCC | 173 |
| 10575 | GGCGGAGCGTTCGGGCCGGC | 172 |
| 10576 | GGGCGGAGCGTTCGGGCCGG | 171 |
| 10577 | CGGGCGGAGCGTTCGGGCCG | 170 |
| 10578 | GCGGGCGGAGCGTTCGGGCC | 169 |
| 10579 | CGCGGGCGGAGCGTTCGGGC | 168 |
| 10580 | CCGCGGGCGGAGCGTTCGGG | 167 |
| 10581 | ACCGCGGGCGGAGCGTTCGG | 166 |
| 10582 | CACCGCGGGCGGAGCGTTCG | 165 |
| 10583 | CCACCGCGGGCGGAGCGTTC | 164 |
| 10584 | CCCACCGCGGGCGGAGCGTT | 163 |
| 10585 | GCCCACCGCGGGCGGAGCGT | 162 |
| 10586 | GGCCCACCGCGGGCGGAGCG | 161 |
| 10587 | CGGCCCACCGCGGGCGGAGC | 160 |
| 10588 | TCGGCCCACCGCGGGCGGAG | 159 |
| 10589 | GTCGGCCCACCGCGGGCGGA | 158 |
| 10590 | AGTCGGCCCACCGCGGGCGG | 157 |
| 10591 | AAGTCGGCCCACCGCGGGCG | 156 |
| 10592 | GAAGTCGGCCCACCGCGGGC | 155 |
| 10593 | GGAAGTCGGCCCACCGCGGG | 154 |
| 10594 | GGGAAGTCGGCCCACCGCGG | 153 |
| 10595 | GGGGAAGTCGGCCCACCGCG | 152 |
| 10596 | AGGGGAAGTCGGCCCACCGC | 151 |
| 10597 | GAGGGGAAGTCGGCCCACCG | 150 |
| 10598 | GGAGGGGAAGTCGGCCCACC | 149 |
| 10599 | CGCCAGCCGGGAGCTTCGGGTGCTCGCG | 235 |
| 10600 | GCCAGCCGGGAGCTTCGGGT | 236 |
| 10601 | CCAGCCGGGAGCTTCGGGTG | 237 |
| 10602 | CAGCCGGGAGCTTCGGGTGC | 238 |
| 10603 | AGCCGGGAGCTTCGGGTGCT | 239 |
| 10604 | GCCGGGAGCTTCGGGTGCTC | 240 |
| 10605 | CCGGGAGCTTCGGGTGCTCG | 241 |
| 10606 | CGGGAGCTTCGGGTGCTCGC | 242 |
| 10607 | GGGAGCTTCGGGTGCTCGCG | 243 |
| 10608 | GGAGCTTCGGGTGCTCGCGC | 244 |
| 10609 | GAGCTTCGGGTGCTCGCGCT | 245 |
| 10610 | AGCTTCGGGTGCTCGCGCTG | 246 |
| 10611 | GCTTCGGGTGCTCGCGCTGC | 247 |
| 10612 | CTTCGGGTGCTCGCGCTGCT | 248 |
| 10613 | TTCGGGTGCTCGCGCTGCTT | 249 |
| 10614 | TCGGGTGCTCGCGCTGCTTC | 250 |
| 10615 | CGGGTGCTCGCGCTGCTTCT | 251 |
| 10616 | GGGTGCTCGCGCTGCTTCTC | 252 |
| 10617 | GGTGCTCGCGCTGCTTCTCC | 253 |
| 10618 | GTGCTCGCGCTGCTTCTCCG | 254 |
| 10619 | TGCTCGCGCTGCTTCTCCGG | 255 |
| 10620 | GCTCGCGCTGCTTCTCCGGG | 256 |
| 10621 | CTCGCGCTGCTTCTCCGGGT | 257 |
| 10622 | TCGCGCTGCTTCTCCGGGTA | 258 |
| 10623 | CGCGCTGCTTCTCCGGGTAC | 259 |
| 10624 | GCGCTGCTTCTCCGGGTACG | 260 |
| 10625 | CGCTGCTTCTCCGGGTACGG | 261 |
| 10626 | GCTGCTTCTCCGGGTACGGG | 262 |
| 10627 | CTGCTTCTCCGGGTACGGGC | 263 |
| 10628 | TGCTTCTCCGGGTACGGGCC | 264 |
| 10629 | GCTTCTCCGGGTACGGGCCG | 265 |
| 10630 | CTTCTCCGGGTACGGGCCGC | 266 |
| 10631 | TTCTCCGGGTACGGGCCGCT | 267 |
| 10632 | TCTCCGGGTACGGGCCGCTG | 268 |
| 10633 | CTCCGGGTACGGGCCGCTGG | 269 |
| 10634 | TCCGGGTACGGGCCGCTGGG | 270 |
| 10635 | CCGGGTACGGGCCGCTGGGT | 271 |
| 10636 | CGGGTACGGGCCGCTGGGTG | 272 |
| 10637 | GGGTACGGGCCGCTGGGTGG | 273 |
| 10638 | GGTACGGGCCGCTGGGTGGG | 274 |
| 10639 | GTACGGGCCGCTGGGTGGGG | 275 |
| 10640 | TACGGGCCGCTGGGTGGGGT | 276 |
| 10641 | ACGGGCCGCTGGGTGGGGTC | 277 |
| 10642 | CGGGCCGCTGGGTGGGGTCC | 278 |
| 10643 | GGGCCGCTGGGTGGGGTCCC | 279 |
| 10644 | GGCCGCTGGGTGGGGTCCCG | 280 |
| 10645 | GCCGCTGGGTGGGGTCCCGG | 281 |
| 10646 | CCGCTGGGTGGGGTCCCGGG | 282 |
| 10647 | CGCTGGGTGGGGTCCCGGGC | 283 |
| 10648 | GCTGGGTGGGGTCCCGGGCG | 284 |
| 10649 | CTGGGTGGGGTCCCGGGCGT | 285 |
| 10650 | TGGGTGGGGTCCCGGGCGTG | 286 |
| 10651 | GGGTGGGGTCCCGGGCGTGG | 287 |
| 10652 | GGTGGGGTCCCGGGCGTGGT | 288 |
| 10653 | GTGGGGTCCCGGGCGTGGTG | 289 |
| 10654 | TGGGGTCCCGGGCGTGGTGC | 290 |
| 10655 | GGGGTCCCGGGCGTGGTGCG | 291 |
| 10656 | GGGTCCCGGGCGTGGTGCGG | 292 |
| 10657 | GGTCCCGGGCGTGGTGCGGA | 293 |
| 10658 | GTCCCGGGCGTGGTGCGGAG | 294 |
| 10659 | TCCCGGGCGTGGTGCGGAGG | 295 |
| 10660 | CCCGGGCGTGGTGCGGAGGC | 296 |
| 10661 | CCGGGCGTGGTGCGGAGGCG | 297 |
| 10662 | CGGGCGTGGTGCGGAGGCGC | 298 |
| 10663 | CCGCCAGCCGGGAGCTTCGG | 234 |
| 10664 | GCCGCCAGCCGGGAGCTTCG | 233 |
| 10665 | TGCCGCCAGCCGGGAGCTTC | 232 |
| 10666 | CTGCCGCCAGCCGGGAGCTT | 231 |
| 10667 | TCTGCCGCCAGCCGGGAGCT | 230 |
| 10668 | TTCTGCCGCCAGCCGGGAGC | 229 |
| 10669 | TTTCTGCCGCCAGCCGGGAG | 228 |
| 10670 | GTTTCTGCCGCCAGCCGGGA | 227 |
| 10671 | GGTTTCTGCCGCCAGCCGGG | 226 |
| 10672 | CGGTTTCTGCCGCCAGCCGG | 225 |
| 10673 | CCGGTTTCTGCCGCCAGCCG | 224 |
| 10674 | CCCGGTTTCTGCCGCCAGCC | 223 |
| 10675 | TCCCGGTTTCTGCCGCCAGC | 222 |
| 10676 | CTCCCGGTTTCTGCCGCCAG | 221 |
| 10677 | ACTCCCGGTTTCTGCCGCCA | 220 |
| 10678 | CACTCCCGGTTTCTGCCGCC | 219 |
| 10679 | CCACTCCCGGTTTCTGCCGC | 218 |
| 10680 | CCCACTCCCGGTTTCTGCCG | 217 |
| 10681 | CCCCACTCCCGGTTTCTGCC | 216 |
| 10682 | GCCCCACTCCCGGTTTCTGC | 215 |
| 10683 | GGCCCCACTCCCGGTTTCTG | 214 |
| 10684 | CGGCCCCACTCCCGGTTTCT | 213 |
| 10685 | CCGGCCCCACTCCCGGTTTC | 212 |
| 10686 | CCCGGCCCCACTCCCGGTTT | 211 |
| 10687 | GCCCGGCCCCACTCCCGGTT | 210 |
| 10688 | CGCCCGGCCCCACTCCCGGT | 209 |
| 10689 | TCGCCCGGCCCCACTCCCGG | 208 |
| 10690 | CTCGCCCGGCCCCACTCCCG | 207 |
| 10691 | ACTCGCCCGGCCCCACTCCC | 206 |
| 10692 | CACTCGCCCGGCCCCACTCC | 205 |
| 10693 | GCACTCGCCCGGCCCCACTC | 204 |
| 10694 | CGCACTCGCCCGGCCCCACT | 203 |
| 10695 | GCGCACTCGCCCGGCCCCAC | 202 |
| 10696 | CGCGCACTCGCCCGGCCCCA | 201 |
| 10697 | CCGCGCACTCGCCCGGCCCC | 200 |
| 10698 | GCCGCGCACTCGCCCGGCCC | 199 |
| 10699 | TGCCGCGCACTCGCCCGGCC | 198 |
| 10700 | ATGCCGCGCACTCGCCCGGC | 197 |
| 10701 | GATGCCGCGCACTCGCCCGG | 196 |
| 10702 | GGATGCCGCGCACTCGCCCG | 195 |
| 10703 | GGGATGCCGCGCACTCGCCC | 194 |
| 10704 | TGGGATGCCGCGCACTCGCC | 193 |
| 10705 | CTGGGATGCCGCGCACTCGC | 192 |
| 10706 | CCTGGGATGCCGCGCACTCG | 191 |
| 10707 | GCCTGGGATGCCGCGCACTC | 190 |
| 10708 | GGCCTGGGATGCCGCGCACT | 189 |
| 10709 | CGGCCTGGGATGCCGCGCAC | 188 |
| 10710 | CCGGCCTGGGATGCCGCGCA | 187 |
| 10711 | GCCGGCCTGGGATGCCGCGC | 186 |
| 10712 | GGCCGGCCTGGGATGCCGCG | 185 |
| 10713 | GGGCCGGCCTGGGATGCCGC | 184 |
| 10714 | CGGGCCGGCCTGGGATGCCG | 183 |
| 10715 | TCGGGCCGGCCTGGGATGCC | 182 |
| 10716 | TTCGGGCCGGCCTGGGATGC | 181 |
| 10717 | GTTCGGGCCGGCCTGGGATG | 180 |
| 10718 | CGTTCGGGCCGGCCTGGGAT | 179 |
| 10719 | GCGTTCGGGCCGGCCTGGGA | 178 |
| 10720 | AGCGTTCGGGCCGGCCTGGG | 177 |
| 10721 | GAGCGTTCGGGCCGGCCTGG | 176 |
| 10722 | GGAGCGTTCGGGCCGGCCTG | 175 |
| 10723 | CGGAGCGTTCGGGCCGGCCT | 174 |
| 10724 | GCGGAGCGTTCGGGCCGGCC | 173 |
| 10725 | GGCGGAGCGTTCGGGCCGGC | 172 |
| 10726 | GGGCGGAGCGTTCGGGCCGG | 171 |
| 10727 | CGGGCGGAGCGTTCGGGCCG | 170 |
| 10728 | GCGGGCGGAGCGTTCGGGCC | 169 |
| 10729 | CGCGGGCGGAGCGTTCGGGC | 168 |
| 10730 | CCGCGGGCGGAGCGTTCGGG | 167 |
| 10731 | ACCGCGGGCGGAGCGTTCGG | 166 |
| 10732 | CACCGCGGGCGGAGCGTTCG | 165 |
| 10733 | CCACCGCGGGCGGAGCGTTC | 164 |
| 10734 | CCCACCGCGGGCGGAGCGTT | 163 |
| 10735 | GCCCACCGCGGGCGGAGCGT | 162 |
| 10736 | GGCCCACCGCGGGCGGAGCG | 161 |
| 10737 | CGGCCCACCGCGGGCGGAGC | 160 |
| 10738 | TCGGCCCACCGCGGGCGGAG | 159 |
| 10739 | GTCGGCCCACCGCGGGCGGA | 158 |
| 10740 | AGTCGGCCCACCGCGGGCGG | 157 |
| 10741 | AAGTCGGCCCACCGCGGGCG | 156 |
| 10742 | GAAGTCGGCCCACCGCGGGC | 155 |
| 10743 | GGAAGTCGGCCCACCGCGGG | 154 |
| 10744 | GGGAAGTCGGCCCACCGCGG | 153 |
| 10745 | GGGGAAGTCGGCCCACCGCG | 152 |
| 10746 | AGGGGAAGTCGGCCCACCGC | 151 |
| 10747 | GAGGGGAAGTCGGCCCACCG | 150 |
| 10748 | GGAGGGGAAGTCGGCCCACC | 149 |
| 10749 | CGGGTACGGGCCGCTGGGTGGGGTCCCG | 272 |
| 10750 | GGGTACGGGCCGCTGGGTGG | 273 |
| 10751 | GGTACGGGCCGCTGGGTGGG | 274 |
| 10752 | GTACGGGCCGCTGGGTGGGG | 275 |
| 10753 | TACGGGCCGCTGGGTGGGGT | 276 |
| 10754 | ACGGGCCGCTGGGTGGGGTC | 277 |
| 10755 | CGGGCCGCTGGGTGGGGTCC | 278 |
| 10756 | GGGCCGCTGGGTGGGGTCCC | 279 |
| 10757 | GGCCGCTGGGTGGGGTCCCG | 280 |
| 10758 | GCCGCTGGGTGGGGTCCCGG | 281 |
| 10759 | CCGCTGGGTGGGGTCCCGGG | 282 |
| 10760 | CGCTGGGTGGGGTCCCGGGC | 283 |
| 10761 | GCTGGGTGGGGTCCCGGGCG | 284 |
| 10762 | CTGGGTGGGGTCCCGGGCGT | 285 |
| 10763 | TGGGTGGGGTCCCGGGCGTG | 286 |
| 10764 | GGGTGGGGTCCCGGGCGTGG | 287 |
| 10765 | GGTGGGGTCCCGGGCGTGGT | 288 |
| 10766 | GTGGGGTCCCGGGCGTGGTG | 289 |
| 10767 | TGGGGTCCCGGGCGTGGTGC | 290 |
| 10768 | GGGGTCCCGGGCGTGGTGCG | 291 |
| 10769 | GGGTCCCGGGCGTGGTGCGG | 292 |
| 10770 | GGTCCCGGGCGTGGTGCGGA | 293 |
| 10771 | GTCCCGGGCGTGGTGCGGAG | 294 |
| 10772 | TCCCGGGCGTGGTGCGGAGG | 295 |
| 10773 | CCCGGGCGTGGTGCGGAGGC | 296 |
| 10774 | CCGGGCGTGGTGCGGAGGCG | 297 |
| 10775 | CGGGCGTGGTGCGGAGGCGC | 298 |
| 10776 | CCGGGTACGGGCCGCTGGGT | 271 |
| 10777 | TCCGGGTACGGGCCGCTGGG | 270 |
| 10778 | CTCCGGGTACGGGCCGCTGG | 269 |
| 10779 | TCTCCGGGTACGGGCCGCTG | 268 |
| 10780 | TTCTCCGGGTACGGGCCGCT | 267 |
| 10781 | CTTCTCCGGGTACGGGCCGC | 266 |
| 10782 | GCTTCTCCGGGTACGGGCCG | 265 |
| 10783 | TGCTTCTCCGGGTACGGGCC | 264 |
| 10784 | CTGCTTCTCCGGGTACGGGC | 263 |
| 10785 | GCTGCTTCTCCGGGTACGGG | 262 |
| 10786 | CGCTGCTTCTCCGGGTACGG | 261 |
| 10787 | GCGCTGCTTCTCCGGGTACG | 260 |
| 10788 | CGCGCTGCTTCTCCGGGTAC | 259 |
| 10789 | TCGCGCTGCTTCTCCGGGTA | 258 |
| 10790 | CTCGCGCTGCTTCTCCGGGT | 257 |
| 10791 | GCTCGCGCTGCTTCTCCGGG | 256 |
| 10792 | TGCTCGCGCTGCTTCTCCGG | 255 |
| 10793 | GTGCTCGCGCTGCTTCTCCG | 254 |
| 10794 | GGTGCTCGCGCTGCTTCTCC | 253 |
| 10795 | GGGTGCTCGCGCTGCTTCTC | 252 |
| 10796 | CGGGTGCTCGCGCTGCTTCT | 251 |
| 10797 | TCGGGTGCTCGCGCTGCTTC | 250 |
| 10798 | TTCGGGTGCTCGCGCTGCTT | 249 |
| 10799 | CTTCGGGTGCTCGCGCTGCT | 248 |
| 10800 | GCTTCGGGTGCTCGCGCTGC | 247 |
| 10801 | AGCTTCGGGTGCTCGCGCTG | 246 |
| 10802 | GAGCTTCGGGTGCTCGCGCT | 245 |
| 10803 | GGAGCTTCGGGTGCTCGCGC | 244 |
| 10804 | GGGAGCTTCGGGTGCTCGCG | 243 |
| 10805 | CGGGAGCTTCGGGTGCTCGC | 242 |
| 10806 | CCGGGAGCTTCGGGTGCTCG | 241 |
| 10807 | GCCGGGAGCTTCGGGTGCTC | 240 |
| 10808 | AGCCGGGAGCTTCGGGTGCT | 239 |
| 10809 | CAGCCGGGAGCTTCGGGTGC | 238 |
| 10810 | CCAGCCGGGAGCTTCGGGTG | 237 |
| 10811 | GCCAGCCGGGAGCTTCGGGT | 236 |
| 10812 | CGCCAGCCGGGAGCTTCGGG | 235 |
| 10813 | CCGCCAGCCGGGAGCTTCGG | 234 |
| 10814 | GCCGCCAGCCGGGAGCTTCG | 233 |
| 10815 | TGCCGCCAGCCGGGAGCTTC | 232 |
| 10816 | CTGCCGCCAGCCGGGAGCTT | 231 |
| 10817 | TCTGCCGCCAGCCGGGAGCT | 230 |
| 10818 | TTCTGCCGCCAGCCGGGAGC | 229 |
| 10819 | TTTCTGCCGCCAGCCGGGAG | 228 |
| 10820 | GTTTCTGCCGCCAGCCGGGA | 227 |
| 10821 | GGTTTCTGCCGCCAGCCGGG | 226 |
| 10822 | CGGTTTCTGCCGCCAGCCGG | 225 |
| 10823 | CCGGTTTCTGCCGCCAGCCG | 224 |
| 10824 | CCCGGTTTCTGCCGCCAGCC | 223 |
| 10825 | TCCCGGTTTCTGCCGCCAGC | 222 |
| 10826 | CTCCCGGTTTCTGCCGCCAG | 221 |
| 10827 | ACTCCCGGTTTCTGCCGCCA | 220 |
| 10828 | CACTCCCGGTTTCTGCCGCC | 219 |
| 10829 | CCACTCCCGGTTTCTGCCGC | 218 |
| 10830 | CCCACTCCCGGTTTCTGCCG | 217 |
| 10831 | CCCCACTCCCGGTTTCTGCC | 216 |
| 10832 | GCCCCACTCCCGGTTTCTGC | 215 |
| 10833 | GGCCCCACTCCCGGTTTCTG | 214 |
| 10834 | CGGCCCCACTCCCGGTTTCT | 213 |
| 10835 | CCGGCCCCACTCCCGGTTTC | 212 |
| 10836 | CCCGGCCCCACTCCCGGTTT | 211 |
| 10837 | GCCCGGCCCCACTCCCGGTT | 210 |
| 10838 | CGCCCGGCCCCACTCCCGGT | 209 |
| 10839 | TCGCCCGGCCCCACTCCCGG | 208 |
| 10840 | CTCGCCCGGCCCCACTCCCG | 207 |
| 10841 | ACTCGCCCGGCCCCACTCCC | 206 |
| 10842 | CACTCGCCCGGCCCCACTCC | 205 |
| 10843 | GCACTCGCCCGGCCCCACTC | 204 |
| 10844 | CGCACTCGCCCGGCCCCACT | 203 |
| 10845 | GCGCACTCGCCCGGCCCCAC | 202 |
| 10846 | CGCGCACTCGCCCGGCCCCA | 201 |
| 10847 | CCGCGCACTCGCCCGGCCCC | 200 |
| 10848 | GCCGCGCACTCGCCCGGCCC | 199 |
| 10849 | TGCCGCGCACTCGCCCGGCC | 198 |
| 10850 | ATGCCGCGCACTCGCCCGGC | 197 |
| 10851 | GATGCCGCGCACTCGCCCGG | 196 |
| 10852 | GGATGCCGCGCACTCGCCCG | 195 |
| 10853 | GGGATGCCGCGCACTCGCCC | 194 |
| 10854 | TGGGATGCCGCGCACTCGCC | 193 |
| 10855 | CTGGGATGCCGCGCACTCGC | 192 |
| 10856 | CCTGGGATGCCGCGCACTCG | 191 |
| 10857 | GCCTGGGATGCCGCGCACTC | 190 |
| 10858 | GGCCTGGGATGCCGCGCACT | 189 |
| 10859 | CGGCCTGGGATGCCGCGCAC | 188 |
| 10860 | CCGGCCTGGGATGCCGCGCA | 187 |
| 10861 | GCCGGCCTGGGATGCCGCGC | 186 |
| 10862 | GGCCGGCCTGGGATGCCGCG | 185 |
| 10863 | GGGCCGGCCTGGGATGCCGC | 184 |
| 10864 | CGGGCCGGCCTGGGATGCCG | 183 |
| 10865 | TCGGGCCGGCCTGGGATGCC | 182 |
| 10866 | TTCGGGCCGGCCTGGGATGC | 181 |
| 10867 | GTTCGGGCCGGCCTGGGATG | 180 |
| 10868 | CGTTCGGGCCGGCCTGGGAT | 179 |
| 10869 | GCGTTCGGGCCGGCCTGGGA | 178 |
| 10870 | AGCGTTCGGGCCGGCCTGGG | 177 |
| 10871 | GAGCGTTCGGGCCGGCCTGG | 176 |
| 10872 | GGAGCGTTCGGGCCGGCCTG | 175 |
| 10873 | CGGAGCGTTCGGGCCGGCCT | 174 |
| 10874 | GCGGAGCGTTCGGGCCGGCC | 173 |
| 10875 | GGCGGAGCGTTCGGGCCGGC | 172 |
| 10876 | GGGCGGAGCGTTCGGGCCGG | 171 |
| 10877 | CGGGCGGAGCGTTCGGGCCG | 170 |
| 10878 | GCGGGCGGAGCGTTCGGGCC | 169 |
| 10879 | CGCGGGCGGAGCGTTCGGGC | 168 |
| 10880 | CCGCGGGCGGAGCGTTCGGG | 167 |
| 10881 | ACCGCGGGCGGAGCGTTCGG | 166 |
| 10882 | CACCGCGGGCGGAGCGTTCG | 165 |
| 10883 | CCACCGCGGGCGGAGCGTTC | 164 |
| 10884 | CCCACCGCGGGCGGAGCGTT | 163 |
| 10885 | GCCCACCGCGGGCGGAGCGT | 162 |
| 10886 | GGCCCACCGCGGGCGGAGCG | 161 |
| 10887 | CGGCCCACCGCGGGCGGAGC | 160 |
| 10888 | TCGGCCCACCGCGGGCGGAG | 159 |
| 10889 | GTCGGCCCACCGCGGGCGGA | 158 |
| 10890 | AGTCGGCCCACCGCGGGCGG | 157 |
| 10891 | AAGTCGGCCCACCGCGGGCG | 156 |
| 10892 | GAAGTCGGCCCACCGCGGGC | 155 |
| 10893 | GGAAGTCGGCCCACCGCGGG | 154 |
| 10894 | GGGAAGTCGGCCCACCGCGG | 153 |
| 10895 | GGGGAAGTCGGCCCACCGCG | 152 |
| 10896 | AGGGGAAGTCGGCCCACCGC | 151 |
| 10897 | GAGGGGAAGTCGGCCCACCG | 150 |
| 10898 | GGAGGGGAAGTCGGCCCACC | 149 |
| 10899 | GTGCGGAGGCGCAGGGCCGGGCTCCG | 306 |
| 10900 | CTACGCGCGGCTGCAGGGGGCGC | 339 |
| 10901 | TACGCGCGGCTGCAGGGGGC | 340 |
| 10902 | ACGCGCGGCTGCAGGGGGCG | 341 |
| 10903 | CGCGCGGCTGCAGGGGGCGC | 342 |
| 10904 | GCGCGGCTGCAGGGGGCGCT | 343 |
| 10905 | CGCGGCTGCAGGGGGCGCTG | 344 |
| 10906 | GCGGCTGCAGGGGGCGCTGG | 345 |
| 10907 | CGGCTGCAGGGGGCGCTGGG | 346 |
| 10908 | CCTACGCGCGGCTGCAGGGG | 338 |
| 10909 | GCCTACGCGCGGCTGCAGGG | 337 |
| 10910 | TGCCTACGCGCGGCTGCAGG | 336 |
| 10911 | CTGCCTACGCGCGGCTGCAG | 335 |
| 10912 | TCTGCCTACGCGCGGCTGCA | 334 |
| 10913 | CTCTGCCTACGCGCGGCTGC | 333 |
| 10914 | TCTCTGCCTACGCGCGGCTG | 332 |
| 10915 | GTCTCTGCCTACGCGCGGCT | 331 |
| 10916 | CGTCTCTGCCTACGCGCGGC | 330 |
| 10917 | CCGTCTCTGCCTACGCGCGG | 329 |
| 10918 | TCCGTCTCTGCCTACGCGCG | 328 |
| 10919 | CTCCGTCTCTGCCTACGCGC | 327 |
| 10920 | GCTCCGTCTCTGCCTACGCG | 326 |
| 10921 | GGCTCCGTCTCTGCCTACGC | 325 |
| 10922 | GGGCTCCGTCTCTGCCTACG | 324 |
| 10923 | CGGGCTCCGTCTCTGCCTAC | 323 |
| 10924 | CCGGGCTCCGTCTCTGCCTA | 322 |
| 10925 | GCCGGGCTCCGTCTCTGCCT | 321 |
| 10926 | GGCCGGGCTCCGTCTCTGCC | 320 |
| 10927 | GGGCCGGGCTCCGTCTCTGC | 319 |
| 10928 | AGGGCCGGGCTCCGTCTCTG | 318 |
| 10929 | CAGGGCCGGGCTCCGTCTCT | 317 |
| 10930 | GCAGGGCCGGGCTCCGTCTC | 316 |
| 10931 | CGCAGGGCCGGGCTCCGTCT | 315 |
| 10932 | GCGCAGGGCCGGGCTCCGTC | 314 |
| 10933 | GGCGCAGGGCCGGGCTCCGT | 313 |
| 10934 | AGGCGCAGGGCCGGGCTCCG | 312 |
| 10935 | GAGGCGCAGGGCCGGGCTCC | 311 |
| 10936 | GGAGGCGCAGGGCCGGGCTC | 310 |
| 10937 | CGGAGGCGCAGGGCCGGGCT | 309 |
| 10938 | CTGCGCAGGACTCGCGTCCTGGCCCG | 375 |
| 10939 | TGCGCAGGACTCGCGTCCTG | 376 |
| 10940 | GCGCAGGACTCGCGTCCTGG | 377 |
| 10941 | CGCAGGACTCGCGTCCTGGC | 378 |
| 10942 | GCAGGACTCGCGTCCTGGCC | 379 |
| 10943 | CAGGACTCGCGTCCTGGCCC | 380 |
| 10944 | AGGACTCGCGTCCTGGCCCG | 381 |
| 10945 | GGACTCGCGTCCTGGCCCGG | 382 |
| 10946 | GACTCGCGTCCTGGCCCGGG | 383 |
| 10947 | ACTCGCGTCCTGGCCCGGGC | 384 |
| 10948 | CTCGCGTCCTGGCCCGGGCC | 385 |
| 10949 | TCGCGTCCTGGCCCGGGCCT | 386 |
| 10950 | CGCGTCCTGGCCCGGGCCTC | 387 |
| 10951 | GCGTCCTGGCCCGGGCCTCC | 388 |
| 10952 | CGTCCTGGCCCGGGCCTCCC | 389 |
| 10953 | GTCCTGGCCCGGGCCTCCCA | 390 |
| 10954 | TCCTGGCCCGGGCCTCCCAG | 391 |
| 10955 | CCTGGCCCGGGCCTCCCAGC | 392 |
| 10956 | CTGGCCCGGGCCTCCCAGCC | 393 |
| 10957 | TGGCCCGGGCCTCCCAGCCC | 394 |
| 10958 | GGCCCGGGCCTCCCAGCCCG | 395 |
| 10959 | GCCCGGGCCTCCCAGCCCGC | 396 |
| 10960 | CCCGGGCCTCCCAGCCCGCA | 397 |
| 10961 | CCGGGCCTCCCAGCCCGCAG | 398 |
| 10962 | CGGGCCTCCCAGCCCGCAGA | 399 |
| 10963 | GGGCCTCCCAGCCCGCAGAG | 400 |
| 10964 | GGCCTCCCAGCCCGCAGAGC | 401 |
| 10965 | GCCTCCCAGCCCGCAGAGCG | 402 |
| 10966 | CCTCCCAGCCCGCAGAGCGC | 403 |
| 10967 | CTCCCAGCCCGCAGAGCGCG | 404 |
| 10968 | TCCCAGCCCGCAGAGCGCGG | 405 |
| 10969 | CCCAGCCCGCAGAGCGCGGG | 406 |
| 10970 | CCAGCCCGCAGAGCGCGGGA | 407 |
| 10971 | CAGCCCGCAGAGCGCGGGAT | 408 |
| 10972 | AGCCCGCAGAGCGCGGGATG | 409 |
| 10973 | GCCCGCAGAGCGCGGGATGG | 410 |
| 10974 | CCCGCAGAGCGCGGGATGGC | 411 |
| 10975 | CCGCAGAGCGCGGGATGGCT | 412 |
| 10976 | CGCAGAGCGCGGGATGGCTC | 413 |
| 10977 | GCAGAGCGCGGGATGGCTCT | 414 |
| 10978 | CAGAGCGCGGGATGGCTCTG | 415 |
| 10979 | AGAGCGCGGGATGGCTCTGG | 416 |
| 10980 | GAGCGCGGGATGGCTCTGGG | 417 |
| 10981 | AGCGCGGGATGGCTCTGGGC | 418 |
| 10982 | GCGCGGGATGGCTCTGGGCT | 419 |
| 10983 | CGCGGGATGGCTCTGGGCTC | 420 |
| 10984 | GCGGGATGGCTCTGGGCTCA | 421 |
| 10985 | CGGGATGGCTCTGGGCTCAG | 422 |
| 10986 | GCTGCGCAGGACTCGCGTCC | 374 |
| 10987 | GGCTGCGCAGGACTCGCGTC | 373 |
| 10988 | CGGCTGCGCAGGACTCGCGT | 372 |
| 10989 | TCGGCTGCGCAGGACTCGCG | 371 |
| 10990 | CTCGGCTGCGCAGGACTCGC | 370 |
| 10991 | CCTCGGCTGCGCAGGACTCG | 369 |
| 10992 | ACCTCGGCTGCGCAGGACTC | 368 |
| 10993 | AACCTCGGCTGCGCAGGACT | 367 |
| 10994 | GAACCTCGGCTGCGCAGGAC | 366 |
| 10995 | GGAACCTCGGCTGCGCAGGA | 365 |
| 10996 | GGGAACCTCGGCTGCGCAGG | 364 |
| 10997 | GGGGAACCTCGGCTGCGCAG | 363 |
| 10998 | TGGGGAACCTCGGCTGCGCA | 362 |
| 10999 | CTGGGGAACCTCGGCTGCGC | 361 |
| 11000 | GCTGGGGAACCTCGGCTGCG | 360 |
| 11001 | CGCTGGGGAACCTCGGCTGC | 359 |
| 11002 | GCGCTGGGGAACCTCGGCTG | 358 |
| 11003 | GGCGCTGGGGAACCTCGGCT | 357 |
| 11004 | GGGCGCTGGGGAACCTCGGC | 356 |
| 11005 | GGGGCGCTGGGGAACCTCGG | 355 |
| 11006 | GGGGGCGCTGGGGAACCTCG | 354 |
| 11007 | AGGGGGCGCTGGGGAACCTC | 353 |
| 11008 | CAGGGGGCGCTGGGGAACCT | 352 |
| 11009 | CCCGCAGAGCGCGGGATGGCTC | 411 |
| 11010 | CCGCAGAGCGCGGGATGGCT | 412 |
| 11011 | CGCAGAGCGCGGGATGGCTC | 413 |
| 11012 | GCAGAGCGCGGGATGGCTCT | 414 |
| 11013 | CAGAGCGCGGGATGGCTCTG | 415 |
| 11014 | AGAGCGCGGGATGGCTCTGG | 416 |
| 11015 | GAGCGCGGGATGGCTCTGGG | 417 |
| 11016 | AGCGCGGGATGGCTCTGGGC | 418 |
| 11017 | GCGCGGGATGGCTCTGGGCT | 419 |
| 11018 | CGCGGGATGGCTCTGGGCTC | 420 |
| 11019 | GCGGGATGGCTCTGGGCTCA | 421 |
| 11020 | CGGGATGGCTCTGGGCTCAG | 422 |
| 11021 | GCCCGCAGAGCGCGGGATGG | 410 |
| 11022 | AGCCCGCAGAGCGCGGGATG | 409 |
| 11023 | CAGCCCGCAGAGCGCGGGAT | 408 |
| 11024 | CCAGCCCGCAGAGCGCGGGA | 407 |
| 11025 | CCCAGCCCGCAGAGCGCGGG | 406 |
| 11026 | TCCCAGCCCGCAGAGCGCGG | 405 |
| 11027 | CTCCCAGCCCGCAGAGCGCG | 404 |
| 11028 | CCTCCCAGCCCGCAGAGCGC | 403 |
| 11029 | GCCTCCCAGCCCGCAGAGCG | 402 |
| 11030 | GGCCTCCCAGCCCGCAGAGC | 401 |
| 11031 | GGGCCTCCCAGCCCGCAGAG | 400 |
| 11032 | CGGGCCTCCCAGCCCGCAGA | 399 |
| 11033 | CCGGGCCTCCCAGCCCGCAG | 398 |
| 11034 | CCCGGGCCTCCCAGCCCGCA | 397 |
| 11035 | GCCCGGGCCTCCCAGCCCGC | 396 |
| 11036 | GGCCCGGGCCTCCCAGCCCG | 395 |
| 11037 | TGGCCCGGGCCTCCCAGCCC | 394 |
| 11038 | CTGGCCCGGGCCTCCCAGCC | 393 |
| 11039 | CCTGGCCCGGGCCTCCCAGC | 392 |
| 11040 | TCCTGGCCCGGGCCTCCCAG | 391 |
| 11041 | GTCCTGGCCCGGGCCTCCCA | 390 |
| 11042 | CGTCCTGGCCCGGGCCTCCC | 389 |
| 11043 | GCGTCCTGGCCCGGGCCTCC | 388 |
| 11044 | CGCGTCCTGGCCCGGGCCTC | 387 |
| 11045 | TCGCGTCCTGGCCCGGGCCT | 386 |
| 11046 | CTCGCGTCCTGGCCCGGGCC | 385 |
| 11047 | ACTCGCGTCCTGGCCCGGGC | 384 |
| 11048 | GACTCGCGTCCTGGCCCGGG | 383 |
| 11049 | GGACTCGCGTCCTGGCCCGG | 382 |
| 11050 | AGGACTCGCGTCCTGGCCCG | 381 |
| 11051 | CAGGACTCGCGTCCTGGCCC | 380 |
| 11052 | GCAGGACTCGCGTCCTGGCC | 379 |
| 11053 | CGCAGGACTCGCGTCCTGGC | 378 |
| 11054 | GCGCAGGACTCGCGTCCTGG | 377 |
| 11055 | TGCGCAGGACTCGCGTCCTG | 376 |
| 11056 | CTGCGCAGGACTCGCGTCCT | 375 |
| 11057 | GCTGCGCAGGACTCGCGTCC | 374 |
| 11058 | GGCTGCGCAGGACTCGCGTC | 373 |
| 11059 | CGGCTGCGCAGGACTCGCGT | 372 |
| 11060 | TCGGCTGCGCAGGACTCGCG | 371 |
| 11061 | CTCGGCTGCGCAGGACTCGC | 370 |
| 11062 | CCTCGGCTGCGCAGGACTCG | 369 |
| 11063 | ACCTCGGCTGCGCAGGACTC | 368 |
| 11064 | AACCTCGGCTGCGCAGGACT | 367 |
| 11065 | GAACCTCGGCTGCGCAGGAC | 366 |
| 11066 | GGAACCTCGGCTGCGCAGGA | 365 |
| 11067 | GGGAACCTCGGCTGCGCAGG | 364 |
| 11068 | GGGGAACCTCGGCTGCGCAG | 363 |
| 11069 | TGGGGAACCTCGGCTGCGCA | 362 |
| 11070 | CTGGGGAACCTCGGCTGCGC | 361 |
| 11071 | GCTGGGGAACCTCGGCTGCG | 360 |
| 11072 | CGCTGGGGAACCTCGGCTGC | 359 |
| 11073 | GCGCTGGGGAACCTCGGCTG | 358 |
| 11074 | GGCGCTGGGGAACCTCGGCT | 357 |
| 11075 | GGGCGCTGGGGAACCTCGGC | 356 |
| 11076 | GGGGCGCTGGGGAACCTCGG | 355 |
| 11077 | GGGGGCGCTGGGGAACCTCG | 354 |
| 11078 | AGGGGGCGCTGGGGAACCTC | 353 |
| 11079 | CAGGGGGCGCTGGGGAACCT | 352 |
| 11080 | CGGACCTGATGGGGCACGGGCTTCCCC | 448 |
| 11081 | GGACCTGATGGGGCACGGGC | 449 |
| 11082 | GACCTGATGGGGCACGGGCT | 450 |
| 11083 | ACCTGATGGGGCACGGGCTT | 451 |
| 11084 | CCTGATGGGGCACGGGCTTC | 452 |
| 11085 | CTGATGGGGCACGGGCTTCC | 453 |
| 11086 | TGATGGGGCACGGGCTTCCC | 454 |
| 11087 | GATGGGGCACGGGCTTCCCC | 455 |
| 11088 | ATGGGGCACGGGCTTCCCCT | 456 |
| 11089 | TGGGGCACGGGCTTCCCCTT | 457 |
| 11090 | GGGGCACGGGCTTCCCCTTT | 458 |
| 11091 | GGGCACGGGCTTCCCCTTTT | 459 |
| 11092 | GGCACGGGCTTCCCCTTTTA | 460 |
| 11093 | GCACGGGCTTCCCCTTTTAA | 461 |
| 11094 | CACGGGCTTCCCCTTTTAAC | 462 |
| 11095 | ACGGGCTTCCCCTTTTAACG | 463 |
| 11096 | CGGGCTTCCCCTTTTAACGG | 464 |
| 11097 | GGGCTTCCCCTTTTAACGGT | 465 |
| 11098 | GGCTTCCCCTTTTAACGGTG | 466 |
| 11099 | GCTTCCCCTTTTAACGGTGG | 467 |
| 11100 | CTTCCCCTTTTAACGGTGGT | 468 |
| 11101 | TTCCCCTTTTAACGGTGGTT | 469 |
| 11102 | TCCCCTTTTAACGGTGGTTG | 470 |
| 11103 | CCCCTTTTAACGGTGGTTGG | 471 |
| 11104 | CCCTTTTAACGGTGGTTGGG | 472 |
| 11105 | CCTTTTAACGGTGGTTGGGG | 473 |
| 11106 | CTTTTAACGGTGGTTGGGGC | 474 |
| 11107 | TTTTAACGGTGGTTGGGGCC | 475 |
| 11108 | TTTAACGGTGGTTGGGGCCT | 476 |
| 11109 | TTAACGGTGGTTGGGGCCTA | 477 |
| 11110 | TAACGGTGGTTGGGGCCTAG | 478 |
| 11111 | AACGGTGGTTGGGGCCTAGA | 479 |
| 11112 | ACGGTGGTTGGGGCCTAGAA | 480 |
| 11113 | CGGTGGTTGGGGCCTAGAAG | 481 |
| 11114 | GCGGACCTGATGGGGCACGG | 447 |
| 11115 | AGCGGACCTGATGGGGCACG | 446 |
| 11116 | GAGCGGACCTGATGGGGCAC | 445 |
| 11117 | CGGTGGTTGGGGCCTAGAAGCG | 481 |
| 11118 | ACGGTGGTTGGGGCCTAGAA | 480 |
| 11119 | AACGGTGGTTGGGGCCTAGA | 479 |
| 11120 | TAACGGTGGTTGGGGCCTAG | 478 |
| 11121 | TTAACGGTGGTTGGGGCCTA | 477 |
| 11122 | TTTAACGGTGGTTGGGGCCT | 476 |
| 11123 | TTTTAACGGTGGTTGGGGCC | 475 |
| 11124 | CTTTTAACGGTGGTTGGGGC | 474 |
| 11125 | CCTTTTAACGGTGGTTGGGG | 473 |
| 11126 | CCCTTTTAACGGTGGTTGGG | 472 |
| 11127 | CCCCTTTTAACGGTGGTTGG | 471 |
| 11128 | TCCCCTTTTAACGGTGGTTG | 470 |
| 11129 | TTCCCCTTTTAACGGTGGTT | 469 |
| 11130 | CTTCCCCTTTTAACGGTGGT | 468 |
| 11131 | GCTTCCCCTTTTAACGGTGG | 467 |
| 11132 | GGCTTCCCCTTTTAACGGTG | 466 |
| 11133 | GGGCTTCCCCTTTTAACGGT | 465 |
| 11134 | CGGGCTTCCCCTTTTAACGG | 464 |
| 11135 | ACGGGCTTCCCCTTTTAACG | 463 |
| 11136 | CACGGGCTTCCCCTTTTAAC | 462 |
| 11137 | GCACGGGCTTCCCCTTTTAA | 461 |
| 11138 | GGCACGGGCTTCCCCTTTTA | 460 |
| 11139 | GGGCACGGGCTTCCCCTTTT | 459 |
| 11140 | GGGGCACGGGCTTCCCCTTT | 458 |
| 11141 | TGGGGCACGGGCTTCCCCTT | 457 |
| 11142 | ATGGGGCACGGGCTTCCCCT | 456 |
| 11143 | GATGGGGCACGGGCTTCCCC | 455 |
| 11144 | TGATGGGGCACGGGCTTCCC | 454 |
| 11145 | CTGATGGGGCACGGGCTTCC | 453 |
| 11146 | CCTGATGGGGCACGGGCTTC | 452 |
| 11147 | ACCTGATGGGGCACGGGCTT | 451 |
| 11148 | GACCTGATGGGGCACGGGCT | 450 |
| 11149 | GGACCTGATGGGGCACGGGC | 449 |
| 11150 | CGGACCTGATGGGGCACGGG | 448 |
| 11151 | GCGGACCTGATGGGGCACGG | 447 |
| 11152 | AGCGGACCTGATGGGGCACG | 446 |
| 11153 | GAGCGGACCTGATGGGGCAC | 445 |
| 11154 | CGCGCCCCTCGCTGTGACCGCCCAGCCCG | 524 |
| 11155 | GCGCCCCTCGCTGTGACCGC | 525 |
| 11156 | CGCCCCTCGCTGTGACCGCC | 526 |
| 11157 | GCCCCTCGCTGTGACCGCCC | 527 |
| 11158 | CCCCTCGCTGTGACCGCCCA | 528 |
| 11159 | CCCTCGCTGTGACCGCCCAG | 529 |
| 11160 | CCTCGCTGTGACCGCCCAGC | 530 |
| 11161 | CTCGCTGTGACCGCCCAGCC | 531 |
| 11162 | TCGCTGTGACCGCCCAGCCC | 532 |
| 11163 | CGCTGTGACCGCCCAGCCCG | 533 |
| 11164 | GCTGTGACCGCCCAGCCCGG | 534 |
| 11165 | CTGTGACCGCCCAGCCCGGC | 535 |
| 11166 | TGTGACCGCCCAGCCCGGCG | 536 |
| 11167 | GTGACCGCCCAGCCCGGCGT | 537 |
| 11168 | TGACCGCCCAGCCCGGCGTG | 538 |
| 11169 | GACCGCCCAGCCCGGCGTGG | 539 |
| 11170 | ACCGCCCAGCCCGGCGTGGC | 540 |
| 11171 | CCGCCCAGCCCGGCGTGGCC | 541 |
| 11172 | CGCCCAGCCCGGCGTGGCCC | 542 |
| 11173 | GCCCAGCCCGGCGTGGCCCA | 543 |
| 11174 | CCCAGCCCGGCGTGGCCCAA | 544 |
| 11175 | CCAGCCCGGCGTGGCCCAAA | 545 |
| 11176 | CAGCCCGGCGTGGCCCAAAT | 546 |
| 11177 | AGCCCGGCGTGGCCCAAATG | 547 |
| 11178 | GCCCGGCGTGGCCCAAATGC | 548 |
| 11179 | CCCGGCGTGGCCCAAATGCC | 549 |
| 11180 | CCGGCGTGGCCCAAATGCCA | 550 |
| 11181 | CGGCGTGGCCCAAATGCCAG | 551 |
| 11182 | GGCGTGGCCCAAATGCCAGC | 552 |
| 11183 | GCGTGGCCCAAATGCCAGCC | 553 |
| 11184 | CGTGGCCCAAATGCCAGCCA | 554 |
| 11185 | GCGCGCCCCTCGCTGTGACC | 523 |
| 11186 | TGCGCGCCCCTCGCTGTGAC | 522 |
| 11187 | CTGCGCGCCCCTCGCTGTGA | 521 |
| 11188 | ACTGCGCGCCCCTCGCTGTG | 520 |
| 11189 | AACTGCGCGCCCCTCGCTGT | 519 |
| 11190 | AAACTGCGCGCCCCTCGCTG | 518 |
| 11191 | CAAACTGCGCGCCCCTCGCT | 517 |
| 11192 | CCAAACTGCGCGCCCCTCGC | 516 |
| 11193 | CCCAAACTGCGCGCCCCTCG | 515 |
| 11194 | CCCCAAACTGCGCGCCCCTC | 514 |
| 11195 | ACCCCAAACTGCGCGCCCCT | 513 |
| 11196 | GACCCCAAACTGCGCGCCCC | 512 |
| 11197 | TGACCCCAAACTGCGCGCCC | 511 |
| 11198 | GTGACCCCAAACTGCGCGCC | 510 |
| 11199 | TGTGACCCCAAACTGCGCGC | 509 |
| 11200 | GTGTGACCCCAAACTGCGCG | 508 |
| 11201 | TGTGTGACCCCAAACTGCGC | 507 |
| 11202 | CTGTGTGACCCCAAACTGCG | 506 |
| 11203 | CGGGGAGTGGGACTGCGGCGGGGAGCCG | 580 |
| 11204 | TCGGGGAGTGGGACTGCGGC | 579 |
| 11205 | CTCGGGGAGTGGGACTGCGG | 578 |
| 11206 | ACTCGGGGAGTGGGACTGCG | 577 |
| 11207 | AACTCGGGGAGTGGGACTGC | 576 |
| 11208 | ACTCGCCGAAGGCCCCTGGGGAAC | 718 |
| 11209 | CTCGCCGAAGGCCCCTGGGG | 719 |
| 11210 | TCGCCGAAGGCCCCTGGGGA | 720 |
| 11211 | CGCCGAAGGCCCCTGGGGAA | 721 |
| 11212 | GCCGAAGGCCCCTGGGGAAC | 722 |
| 11213 | CCGAAGGCCCCTGGGGAACA | 723 |
| 11214 | CGAAGGCCCCTGGGGAACAT | 724 |
| 11215 | GACTCGCCGAAGGCCCCTGG | 717 |
| 11216 | AGACTCGCCGAAGGCCCCTG | 716 |
| 11217 | AAGACTCGCCGAAGGCCCCT | 715 |
| 11218 | AAAGACTCGCCGAAGGCCCC | 714 |
| 11219 | AAAAGACTCGCCGAAGGCCC | 713 |
| 11220 | AAAAAGACTCGCCGAAGGCC | 712 |
| 11221 | CAAAAAGACTCGCCGAAGGC | 711 |
| 11222 | CGGGCTGCATGCGTGAGCAGG | 840 |
| 11223 | GGGCTGCATGCGTGAGCAGG | 841 |
| 11224 | GGCTGCATGCGTGAGCAGGC | 842 |
| 11225 | GCTGCATGCGTGAGCAGGCT | 843 |
| 11226 | CTGCATGCGTGAGCAGGCTA | 844 |
| 11227 | TGCATGCGTGAGCAGGCTAG | 845 |
| 11228 | GCATGCGTGAGCAGGCTAGC | 846 |
| 11229 | CATGCGTGAGCAGGCTAGCA | 847 |
| 11230 | ATGCGTGAGCAGGCTAGCAG | 848 |
| 11231 | TGCGTGAGCAGGCTAGCAGC | 849 |
| 11232 | GCGTGAGCAGGCTAGCAGCA | 850 |
| 11233 | CGTGAGCAGGCTAGCAGCAG | 851 |
| 11234 | CCGGGCTGCATGCGTGAGCA | 839 |
| 11235 | CCCGGGCTGCATGCGTGAGC | 838 |
| 11236 | GCCCGGGCTGCATGCGTGAG | 837 |
| 11237 | AGCCCGGGCTGCATGCGTGA | 836 |
| 11238 | CAGCCCGGGCTGCATGCGTG | 835 |
| 11239 | GCAGCCCGGGCTGCATGCGT | 834 |
| 11240 | TGCAGCCCGGGCTGCATGCG | 833 |
| 11241 | CTGCAGCCCGGGCTGCATGC | 832 |
| 11242 | TCTGCAGCCCGGGCTGCATG | 831 |
| 11243 | CTCTGCAGCCCGGGCTGCAT | 830 |
| 11244 | CCTCTGCAGCCCGGGCTGCA | 829 |
| 11245 | TCCTCTGCAGCCCGGGCTGC | 828 |
| 11246 | TTCCTCTGCAGCCCGGGCTG | 827 |
| 11247 | CTTCCTCTGCAGCCCGGGCT | 826 |
| 11248 | ACTTCCTCTGCAGCCCGGGC | 825 |
| 11249 | CACTTCCTCTGCAGCCCGGG | 824 |
| 11250 | ACACTTCCTCTGCAGCCCGG | 823 |
| 11251 | CACACTTCCTCTGCAGCCCG | 822 |
| 11252 | CGGCAGGCGGTTTAGGCTGTGGCTG | 885 |
| 11253 | GGCAGGCGGTTTAGGCTGTG | 886 |
| 11254 | GCAGGCGGTTTAGGCTGTGG | 887 |
| 11255 | CAGGCGGTTTAGGCTGTGGC | 888 |
| 11256 | AGGCGGTTTAGGCTGTGGCT | 889 |
| 11257 | GGCGGTTTAGGCTGTGGCTG | 890 |
| 11258 | GCGGTTTAGGCTGTGGCTGA | 891 |
| 11259 | CGGTTTAGGCTGTGGCTGAC | 892 |
| 11260 | ACGGCAGGCGGTTTAGGCTG | 884 |
| 11261 | AACGGCAGGCGGTTTAGGCT | 883 |
| 11262 | GAACGGCAGGCGGTTTAGGC | 882 |
| 11263 | TGAACGGCAGGCGGTTTAGG | 881 |
| 11264 | CTGAACGGCAGGCGGTTTAG | 880 |
| 11265 | GCTGAACGGCAGGCGGTTTA | 879 |
| 11266 | GGCTGAACGGCAGGCGGTTT | 878 |
| 11267 | AGGCTGAACGGCAGGCGGTT | 877 |
| 11268 | CAGGCTGAACGGCAGGCGGT | 876 |
| 11269 | TCAGGCTGAACGGCAGGCGG | 875 |
| 11270 | CTCAGGCTGAACGGCAGGCG | 874 |
| 11271 | TCTCAGGCTGAACGGCAGGC | 873 |
| 11272 | CTCTCAGGCTGAACGGCAGG | 872 |
| 11273 | CCTCTCAGGCTGAACGGCAG | 871 |
| 11274 | GCCTCTCAGGCTGAACGGCA | 870 |
| 11275 | AGCCTCTCAGGCTGAACGGC | 869 |
| 11276 | CAGCCTCTCAGGCTGAACGG | 868 |
| 11277 | GCAGCCTCTCAGGCTGAACG | 867 |
| 11278 | CCGATTCGGATTGCTCCAGCTGG | 962 |
| 11279 | CGATTCGGATTGCTCCAGCT | 963 |
| 11280 | GATTCGGATTGCTCCAGCTG | 964 |
| 11281 | ATTCGGATTGCTCCAGCTGG | 965 |
| 11282 | TTCGGATTGCTCCAGCTGGT | 966 |
| 11283 | TCGGATTGCTCCAGCTGGTA | 967 |
| 11284 | CGGATTGCTCCAGCTGGTAA | 968 |
| 11285 | ACCGATTCGGATTGCTCCAG | 961 |
| 11286 | AACCGATTCGGATTGCTCCA | 960 |
| 11287 | TAACCGATTCGGATTGCTCC | 959 |
| 11288 | TTAACCGATTCGGATTGCTC | 958 |
| 11289 | CGCACCCACTCAGTTGCCACGGG | 1008 |
| 11290 | GCACCCACTCAGTTGCCACG | 1009 |
| 11291 | CACCCACTCAGTTGCCACGG | 1010 |
| 11292 | ACCCACTCAGTTGCCACGGG | 1011 |
| 11293 | CCCACTCAGTTGCCACGGGA | 1012 |
| 11294 | CCACTCAGTTGCCACGGGAC | 1013 |
| 11295 | CACTCAGTTGCCACGGGACA | 1014 |
| 11296 | ACTCAGTTGCCACGGGACAC | 1015 |
| 11297 | CTCAGTTGCCACGGGACACA | 1016 |
| 11298 | TCAGTTGCCACGGGACACAC | 1017 |
| 11299 | CAGTTGCCACGGGACACACC | 1018 |
| 11300 | AGTTGCCACGGGACACACCT | 1019 |
| 11301 | GTTGCCACGGGACACACCTG | 1020 |
| 11302 | TTGCCACGGGACACACCTGC | 1021 |
| 11303 | TGCCACGGGACACACCTGCT | 1022 |
| 11304 | GCCACGGGACACACCTGCTT | 1023 |
| 11305 | CCACGGGACACACCTGCTTT | 1024 |
| 11306 | CACGGGACACACCTGCTTTT | 1025 |
| 11307 | ACGGGACACACCTGCTTTTA | 1026 |
| 11308 | CGGGACACACCTGCTTTTAG | 1027 |
| 11309 | ACGCACCCACTCAGTTGCCA | 1007 |
| 11310 | CACGCACCCACTCAGTTGCC | 1006 |
| 11311 | TCACGCACCCACTCAGTTGC | 1005 |
| 11312 | TTCACGCACCCACTCAGTTG | 1004 |
| 11313 | TTTCACGCACCCACTCAGTT | 1003 |
| 11314 | TTTTCACGCACCCACTCAGT | 1002 |
| 11315 | CTTTTCACGCACCCACTCAG | 1001 |
| 11316 | CCTTTTCACGCACCCACTCA | 1000 |
| 11317 | CCCTTTTCACGCACCCACTC | 999 |
| 11318 | CCCCTTTTCACGCACCCACT | 998 |
| 11319 | CCCCCTTTTCACGCACCCAC | 997 |
| 11320 | CCCCCCTTTTCACGCACCCA | 996 |
| 11321 | TCCCCCCTTTTCACGCACCC | 995 |
| 11322 | ATCCCCCCTTTTCACGCACC | 994 |
| 11323 | GATCCCCCCTTTTCACGCAC | 993 |
| 11324 | TGATCCCCCCTTTTCACGCA | 992 |
| 11325 | ATGATCCCCCCTTTTCACGC | 991 |
| 11326 | GATGATCCCCCCTTTTCACG | 990 |
| 11327 | CGGAGACCCACAACGCAACACACC | 1099 |
| 11328 | GGAGACCCACAACGCAACAC | 1100 |
| 11329 | GAGACCCACAACGCAACACA | 1101 |
| 11330 | AGACCCACAACGCAACACAC | 1102 |
| 11331 | GACCCACAACGCAACACACC | 1103 |
| 11332 | ACCCACAACGCAACACACCT | 1104 |
| 11333 | CCCACAACGCAACACACCTG | 1105 |
| 11334 | CCACAACGCAACACACCTGA | 1106 |
| 11335 | CACAACGCAACACACCTGAA | 1107 |
| 11336 | ACAACGCAACACACCTGAAC | 1108 |
| 11337 | CAACGCAACACACCTGAACT | 1109 |
| 11338 | AACGCAACACACCTGAACTG | 1110 |
| 11339 | ACGCAACACACCTGAACTGG | 1111 |
| 11340 | CGCAACACACCTGAACTGGG | 1112 |
| 11341 | CCGGAGACCCACAACGCAAC | 1098 |
| 11342 | GCCGGAGACCCACAACGCAA | 1097 |
| 11343 | TGCCGGAGACCCACAACGCA | 1096 |
| 11344 | GTGCCGGAGACCCACAACGC | 1095 |
| 11345 | TGTGCCGGAGACCCACAACG | 1094 |
| 11346 | ATGTGCCGGAGACCCACAAC | 1093 |
| 11347 | AATGTGCCGGAGACCCACAA | 1092 |
| 11348 | AAATGTGCCGGAGACCCACA | 1091 |
| 11349 | GAAATGTGCCGGAGACCCAC | 1090 |
| 11350 | TGAAATGTGCCGGAGACCCA | 1089 |
| 11351 | CTGAAATGTGCCGGAGACCC | 1088 |
| 11352 | TCTGAAATGTGCCGGAGACC | 1087 |
| 11353 | CTCTGAAATGTGCCGGAGAC | 1086 |
| 11354 | CCTCTGAAATGTGCCGGAGA | 1085 |
| 11355 | GCCTCTGAAATGTGCCGGAG | 1084 |
| 11356 | AGCCTCTGAAATGTGCCGGA | 1083 |
| 11357 | GAGCCTCTGAAATGTGCCGG | 1082 |
| 11358 | TGAGCCTCTGAAATGTGCCG | 1081 |

Hot Zones (Relative upstream location to gene start site)
1-750
800-1200

### Examples

Genetic Code (5′ Upstream Region)

(SEQ ID NO: 11983)

CTTTCCTCCAAGGACTGAAACAGACAAGGATACCCCCTCTTACCACTGTT
ATTCTACATAGTGCAGAAAGTCCTGGCCAGAGCTATCAGGCAAGAGGAAG
AAAGGAAGGGTATCCAAACTGGAAAGGAAGAAGTGGTGAGAAAGTTTTAA
TTTTATTTTTTTGCATGTAGTTATTAAGTTTTCCTAGCACCATTTATTAA
AGAGACTGTTTTTTTCCATTGTATGTTCTTTACAGCTTTGTCACAGATTA
GTTGGTTGTAAGTGCATGGATTTATATGTGGATTCTCTATTCTGCTCCAT
TGGTCTATGTGTCTGTTTCTATGCCAATACTGTGCTGTTTTGGTTACTAT
AGCTTTGTAGTAAATTTTGAAGTTAGGTAGTGTGATGCCTCCAGCTTTGT
TCTTTTTGCTCAGGATTGCTTTGGCTATTCAGGGTCTTTTGTGGTTTCTT
ATAAATTTTAGGAATTTTTCTGTTTCGTGAAGAATGTCATTTGTATTTTG
ATAGGAATTGCATTGAATCTGTAAATTGCTTTAGGTAGTATTGTAATTTT
AACAATATTAGTTCTTCCAGTCTATCACGGAGTATATTTCTGGGTTTTTG
TGTCCTCTTCGATTTCTTTTATCAGAGTTTTATTTATAGTTTTTCCTTGC
ATAGATATTTTACTTTTTTAGTTAAATTGATTCCTAGGTATTGTACATTT
TTGTAGCTATTGTAAAAGGAACTGCTTTCTTGATTTTTATTCAGATTGTT
CACTGTTGTCATATAAATGCTATTGATTTTTGTATGTTGATTTTGCATCC
TGCAACTTTACTGAATCAGATCTAACAGCTTTTAGGTGGACTCTTTAGAT
TTTTCTAGGTATAAGATCATGTAGTCTGCAAACAAACCTAATTTGACTTC
TTCCTTTCCAATTTGGATACCCTTCCTTTCTTCCTCTTGCCTGATAGCTC
TGGCCAGGACTTTCTGTACTACGTAGAATAACAGTGGTGAGAGGGGGTAT
CCTTGTCTGTTTCAGCCCTTGGAGGAAAGGCCTTCATTTTTTCTGTGTTC
AGTATGATGTTGACTGTAGGTTTGTCATATATGGCCTTCATTATTTTGAA
GTATGTTCCTTCTATATCCATTTTGGTGAGAATTTTTATCATAAAGGAAT
GTTGAATTTTATCAAATGCTATCTCAGCATCTATTGAAATAAGTATACCG
TTTCTGTTTTTGATTCTGTTAATGACTTATATTTAGATGGTATTTAAAGA
CATAGGAAATGGGTTAGATCTCCTAAAGAGGGAAGATGGAAAGAGAATGA
AAGAGTTTCCAGAATATAGCCCTGGGGGTTTCCCGCACTTATGGCGGAGG
GAAGGGAGCCATCAGAGGAAACTCAGAGTGGCCAGATAGAAAGGCAGGAA
AAAGCTTAATAAGGTGGTATCATGAGAAGAGAGTCTTCCTAGAAGGAGAA
ATGCTTACTCTTGATAAAAACTGAAAAATAGGGTGAGTCCACATTAGAAT
TCTCGCTACTGGGGAGGACTTTCTACACAAGGTTAGAGATCACTTGTATT
TTGTCTACTATAATTTTAGTGCATAATGCATTTTTTTGGCATATAGTGGG
CACTTATATACATATTAATCTGATGACATTTAATAATTGAGTGCCCAAAT
ATTTATGTCGAGTTGAGAGCTAGGGATAGGCATGAGTCTTTCTTAAACAT
CCTTCTCTTCTCCTTCCTCCACCCCCTCACTTGCCTTCAGAAGCATTGAT
CAGAGAGATAGCAGTATCTTCAGTTTTTTTTAAAGCAACATGAAACACAC
TTTATTCCTGCTAACATTAGGAAAAGCGAGCTGTTTTCCAAGCCCTGGAG
GAAGGAAATTCAGCTAACTAACGTGAGGTAATGTAGGGTGGCTATTTCTT
GAAAGGTAGTGAATCATAACTATAACCATACTATGGAAAAAAGTCCTGCC
TTACCAACCACTCCACTGACTGCTTGTCACCAAAACTACGCTATGAAACG
AATTGTGTTGAGTGGCTTTCATTGTAAAAGATTTTGGTGAAGGGAGGGAA
AGAAACTGGTAGGGGTTCAGATCAGAAGATCTGGCTTTGCCAGTTTCTGG
AGGGTGTCAGAATGGCTTCAACATACCTACTTCCTTGGCCTCAACTGGAG
GTTTTGTAGCTGTAAACAAGAAGGATTGCATAGTTCAGAATAACGACACT
GTAAGCTCATTGTGGAACTGGGTTAAAATCAGCATGTAGATCTACTAAGA
AAGAAACACACTCAGCACTACTACAGAAAGAAACAGCCATGGGCCCTGAT
TGTTAGCTTTCTGGAAGCCATTTCATTTTTACAATAGATTTATCACACAC
TGTATTGACTTTTTCCAGTATAGAGTAAGAGAAAGTTAATATTCCTCATG
TTTTGTCTGTTGACAGACTGAAAATAATTGCATTGAGTTTGGCTAGAATA
TCCTGTCATTCCATAAACATCTCAAACTCCACATGGCTAAAACTTAACCC
ATCCATGCCCCCATCTGCATGCACACATACATGCATATAACTTCATTTCT
CAGTGTTTTTTTCTCCATGAATGGTAGCACCATTCTCTTTCAAGAAAGAG
AAATACTTCCCCTTGGGATTATCCTATCTCTACTTATTGCTGCAGGGGCT
TCCAAAATTAGGTTTTCTGTGTTCAGTCTTGCATTCACACTTCTGAAACC
CAGAGCTGACCGAGACAAATTCTTCAACTTCCTGTCAGTCCCAACATAGA
TTTAAAATTCCTAACCTGGCTCATGAGGTTCACCATGTATTCCTGCTTCC
CTAAGTCAGCCTCATATCACACCAACCTGTGTGTGGAGTGGCTAAATACT
CTAGCCAGGCAAGCTCTCTCAGTTCTTCTACCTGGCTCCTCTGGAGCCCT
CCTTATTGCTCATCCCATTCTTAGCCTGATTCAAGATTCCTGGTCCTTCA
AATCTCTCTTTAAGTGTCCTTACCTGGATCTTTCTCTAGTTAGTACAAAT
TTTTCTATCTACCATTGGAGCGAACATTTTTTGAAACTTTGTATCAGTCC
TGCCTTACTCTTGGTGGAATCCTGTGGTCCTAGTCAAGTGCCTGCTCCAT
GAATGTGCTGAATAAATGAATAAGCATTTTAATTGTGTATCTGTCATTAG
TGTCAGATGTGTTATTTATTCCAGCATGGTTTTAGCACACAGACACACTC
TTTGATGCAGACTTTTCTTTTCTTTTTACATATAGCAACAATAAAAAACT
AGACTTTCATCTCCTGAAAATATCAGTCTAATAATCACCTATGGCTGTCT
CTCTGGTTGCTGAAGGAAAAAAAAAAAAAAGGCAGGGCACACCTGGATTG
CATTAGAATGAGACTCACTACCCAGTTCAGGTGTGTTGCGTTGTGGGTCT
CCGGCACATTTCAGAGGCTCATTAGGACCCTGACCCCACACTGGGGTTTA
CACCCCTAAAAGCAGGTGTGTCCCGTGGCAACTGAGTGGGTGCGTGAAAA
GGGGGGATCATCAATTACCAGCTGGAGCAATCCGAATCGGTTAAAGTGAA
TCAAGTCACAGTGCTTCCTTAACCCAACCTCTCTGTTGGGGTCAGCCACA
GCCTAAACCGCCTGCCGTTCAGCCTGAGAGGCTGCTGCTAGCCTGCTCAC
GCATGCAGCCCGGGCTGCAGAGGAAGTGTGGGGAGGAAGGAAGTGGGTAT
AGAAGGGTGCTGAGATGTGGGTCTTGAAGAGAATAGCCATAACGTCTTTG
TCACTAAAATGTTCCCCAGGGGCCTTCGGCGAGTCTTTTTGTTTGGTTTT
TTGTTTTTAATCTGTGGCTCTTGATAATTTATCTAGTGGTTGCCTACACC
TGAAAAACAAGACACAGTGTTTAACTATCAACGAAAGAACTGGACGGCTC
CCCGCCGCAGTCCCACTCCCCGAGTTTGTGGCTGGCATTTGGGCCACGCC
GGGCTGGGCGGTCACAGCGAGGGGCGCGCAGTTTGGGGTCACACAGCTCC
GCTTCTAGGCCCCAACCACCGTTAAAAGGGGAAGCCCGTGCCCCATCAGG
TCCGCTCTTGCTGAGCCCAGAGCCATCCCGCGCTCTGCGGGCTGGGAGGC
CCGGGCCAGGACGCGAGTCCTGCGCAGCCGAGGTTCCCCAGCGCCCCCTG
CAGCCGCGCGTAGGCAGAGACGGAGCCCGGCCCTGCGCCTCCGCACCACG
CCCGGGACCCCACCCAGCGGCCCGTACCCGGAGAAGCAGCGCGAGCACCC
GAAGCTCCCGGCTGGCGGCAGAAACCGGGAGTGGGGCCGGGCGAGTGCGC
GGCATCCCAGGCCGGCCCGAACGCTCCGCCCGCGGTGGGCCGACTTCCCC
TCCTCTTCCCTCTCTCCTTCCTTTAGCCCGCTGGCGCCGGACACGCTGCG
CCTCATCTCTTGGGGCGTTCTTCCCCGTTGGCCAACCGTCGCATCCCGTG
CAACTTTGGGGTAGTGGCCGTTTAGTGTTGAATGTTCCCCACCGAGAGCG
CATG

[0462] TTR

[0463] Transthyretin is a 55 kDa protein that exists as a quaternary structure consisting of four monomers binding as two homodimers to create two thyroxine binding sites per tetramer. The dimer-dimer interface comes apart during the process of tetramer dissociation. TTR misfolding and aggregation is known to be associated with amyloid diseases such as senile systemic amyloidosis, familial amyloid polyneuropathy (FAP) and familial amyloid cardiomyopathy (Foss et al. 2005 Biochemistry 44 (47): 15525-33; Zeldenrust SR and Benson Md. (2010). Protein misfolding diseases: current and emerging principles and therapies. New York: Wiley. Westermark et al., Proc. Natl. Acad. Sci. U.S.A. 87 (7): 2843-5. TTR is predominantly synthesized in the liver and choroid plexus for secretion into blood and CNS, respectively. FAP is characterized by pain, paresthesia, muscular weakness, autonomic dysfunction due to the systemic deposition of variants of the transthyretin protein. A common mutations include the replacement of valine by methionine at position 30 (TTR V30M) or valine by isoleucine (TTR V122L). The misfolding of dissociated monomers is believed to cause aggregation into a variety of structures including amyloid fibrils. Treatment of familial TTR amyloid disease has historically relied on liver transplantation as a crude form of gene therapy. Recent approaches include molecules to kinetically stabilize the TTR tetramer or blocking the synthesis of TTR monomers by siRNA and antisense therapeutics.

[0464] Protein: TTR Gene: TTR (Homo sapiens, chromosome 18, 29171730-29178987 [NCBI Reference Sequence NC_{—}000018.9]; start site location: 29171866; strand: positive)

Gene Identification

| | |
|---|---|
| GeneID | 7276 |
| HGNC | 12405 |
| HPRD | 01447 |
| MIM | 176300 |

Targeted Sequences

| | | | Relative upstream |
|---|---|---|---|
| Sequence | Design | | location to gene start |
| ID No: | ID | Sequence (5′-3′) | site |
| 11359 | | CAACGCCCTGGCTCGAGTGCAGTGGCACG | 775 |
| 11432 | | CTACTATCTCAGATACTCGGCCAACTCG | 1749 |
| 11450 | | CACGCGTTTCAGCACTGCACCCTGTTG | 2086 |

Target Shift Sequences

| | | Relative |
|---|---|---|
| | | upstream |
| Sequence | | location |
| ID | | to gene |
| No: | Sequence (5′-3′) | start site |
| 11359 | CAACGCCCTGGCTCGAGTGCAGTGGCACG | 775 |
| 11360 | AACGCCCTGGCTCGAGTGCA | 776 |
| 11361 | ACGCCCTGGCTCGAGTGCAG | 777 |
| 11362 | CGCCCTGGCTCGAGTGCAGT | 778 |
| 11363 | GCCCTGGCTCGAGTGCAGTG | 779 |
| 11364 | CCCTGGCTCGAGTGCAGTGG | 780 |
| 11365 | CCTGGCTCGAGTGCAGTGGC | 781 |
| 11366 | CTGGCTCGAGTGCAGTGGCA | 782 |
| 11367 | TGGCTCGAGTGCAGTGGCAC | 783 |
| 11368 | GGCTCGAGTGCAGTGGCACG | 784 |
| 11369 | GCTCGAGTGCAGTGGCACGA | 785 |
| 11370 | CTCGAGTGCAGTGGCACGAT | 786 |
| 11371 | TCGAGTGCAGTGGCACGATC | 787 |
| 11372 | CGAGTGCAGTGGCACGATCA | 788 |
| 11373 | GAGTGCAGTGGCACGATCAC | 789 |
| 11374 | AGTGCAGTGGCACGATCACA | 790 |
| 11375 | GTGCAGTGGCACGATCACAG | 791 |
| 11376 | TGCAGTGGCACGATCACAGC | 792 |
| 11377 | GCAGTGGCACGATCACAGCT | 793 |
| 11378 | CAGTGGCACGATCACAGCTC | 794 |
| 11379 | AGTGGCACGATCACAGCTCG | 795 |
| 11380 | GTGGCACGATCACAGCTCGC | 796 |
| 11381 | TGGCACGATCACAGCTCGCT | 797 |
| 11382 | GGCACGATCACAGCTCGCTG | 798 |
| 11383 | GCACGATCACAGCTCGCTGC | 799 |
| 11384 | CACGATCACAGCTCGCTGCA | 800 |
| 11385 | ACGATCACAGCTCGCTGCAG | 801 |
| 11386 | CGATCACAGCTCGCTGCAGC | 802 |
| 11387 | GATCACAGCTCGCTGCAGCC | 803 |
| 11388 | ATCACAGCTCGCTGCAGCCT | 804 |
| 11389 | TCACAGCTCGCTGCAGCCTT | 805 |
| 11390 | CACAGCTCGCTGCAGCCTTG | 806 |
| 11391 | ACAGCTCGCTGCAGCCTTGA | 807 |
| 11392 | CAGCTCGCTGCAGCCTTGAC | 808 |
| 11393 | AGCTCGCTGCAGCCTTGACC | 809 |
| 11394 | GCTCGCTGCAGCCTTGACCT | 810 |
| 11395 | CTCGCTGCAGCCTTGACCTC | 811 |
| 11396 | TCGCTGCAGCCTTGACCTCC | 812 |
| 11397 | CGCTGCAGCCTTGACCTCCC | 813 |
| 11398 | GCTGCAGCCTTGACCTCCCG | 814 |
| 11399 | CTGCAGCCTTGACCTCCCGG | 815 |
| 11400 | TGCAGCCTTGACCTCCCGGG | 816 |
| 11401 | GCAGCCTTGACCTCCCGGGC | 817 |
| 11402 | CAGCCTTGACCTCCCGGGCT | 818 |
| 11403 | AGCCTTGACCTCCCGGGCTC | 819 |
| 11404 | GCCTTGACCTCCCGGGCTCA | 820 |
| 11405 | CCTTGACCTCCCGGGCTCAG | 821 |
| 11406 | CTTGACCTCCCGGGCTCAGG | 822 |
| 11407 | TTGACCTCCCGGGCTCAGGT | 823 |
| 11408 | TGACCTCCCGGGCTCAGGTC | 824 |
| 11409 | GACCTCCCGGGCTCAGGTCA | 825 |
| 11410 | ACCTCCCGGGCTCAGGTCAT | 826 |
| 11411 | CCTCCCGGGCTCAGGTCATC | 827 |
| 11412 | CTCCCGGGCTCAGGTCATCC | 828 |
| 11413 | TCCCGGGCTCAGGTCATCCT | 829 |
| 11414 | CCCGGGCTCAGGTCATCCTC | 830 |
| 11415 | CCGGGCTCAGGTCATCCTCC | 831 |
| 11416 | CGGGCTCAGGTCATCCTCCC | 832 |
| 11417 | CCAACGCCCTGGCTCGAGTG | 774 |
| 11418 | TCCAACGCCCTGGCTCGAGT | 773 |
| 11419 | CTCCAACGCCCTGGCTCGAG | 772 |
| 11420 | ACTCCAACGCCCTGGCTCGA | 771 |
| 11421 | CACTCCAACGCCCTGGCTCG | 770 |
| 11422 | TCACTCCAACGCCCTGGCTC | 769 |
| 11423 | CTCACTCCAACGCCCTGGCT | 768 |
| 11424 | TCTCACTCCAACGCCCTGGC | 767 |
| 11425 | GTCTCACTCCAACGCCCTGG | 766 |
| 11426 | GGTCTCACTCCAACGCCCTG | 765 |
| 11427 | GGGTCTCACTCCAACGCCCT | 764 |
| 11428 | AGGGTCTCACTCCAACGCCC | 763 |
| 11429 | CAGGGTCTCACTCCAACGCC | 762 |
| 11430 | ACAGGGTCTCACTCCAACGC | 761 |
| 11431 | GACAGGGTCTCACTCCAACG | 760 |
| 11432 | CTACTATCTCAGATACTCGGCCAACTCG | 1749 |
| 11433 | TACTATCTCAGATACTCGGC | 1750 |
| 11434 | ACTATCTCAGATACTCGGCC | 1751 |
| 11435 | CTATCTCAGATACTCGGCCA | 1752 |
| 11436 | TATCTCAGATACTCGGCCAA | 1753 |
| 11437 | ATCTCAGATACTCGGCCAAC | 1754 |
| 11438 | TCTCAGATACTCGGCCAACT | 1755 |
| 11439 | CTCAGATACTCGGCCAACTC | 1756 |
| 11440 | TCAGATACTCGGCCAACTCG | 1757 |
| 11441 | CAGATACTCGGCCAACTCGT | 1758 |
| 11442 | AGATACTCGGCCAACTCGTT | 1759 |
| 11443 | GATACTCGGCCAACTCGTTT | 1760 |
| 11444 | ATACTCGGCCAACTCGTTTG | 1761 |
| 11445 | TACTCGGCCAACTCGTTTGT | 1762 |
| 11446 | ACTCGGCCAACTCGTTTGTA | 1763 |
| 11447 | CTCGGCCAACTCGTTTGTAA | 1764 |
| 11448 | TCGGCCAACTCGTTTGTAAA | 1765 |
| 11449 | CGGCCAACTCGTTTGTAAAA | 1766 |
| 11450 | CACGCGTTTCAGCACTGCACCCTGTTG | 2086 |
| 11451 | ACGCGTTTCAGCACTGCACC | 2087 |
| 11452 | CGCGTTTCAGCACTGCACCC | 2088 |
| 11453 | GCGTTTCAGCACTGCACCCT | 2089 |
| 11454 | CGTTTCAGCACTGCACCCTG | 2090 |
| 11455 | GCACGCGTTTCAGCACTGCA | 2085 |
| 11456 | TGCACGCGTTTCAGCACTGC | 2084 |
| 11457 | GTGCACGCGTTTCAGCACTG | 2083 |
| 11458 | TGTGCACGCGTTTCAGCACT | 2082 |
| 11459 | CTGTGCACGCGTTTCAGCAC | 2081 |
| 11460 | ACTGTGCACGCGTTTCAGCA | 2080 |
| 11461 | TACTGTGCACGCGTTTCAGC | 2079 |
| 11462 | CTACTGTGCACGCGTTTCAG | 2078 |
| 11463 | TCTACTGTGCACGCGTTTCA | 2077 |
| 11464 | ATCTACTGTGCACGCGTTTC | 2076 |
| 11465 | AATCTACTGTGCACGCGTTT | 2075 |
| 11466 | AAATCTACTGTGCACGCGTT | 2074 |
| 11467 | AAAATCTACTGTGCACGCGT | 2073 |
| 11468 | CAAAATCTACTGTGCACGCG | 2072 |
| 11469 | GCAAAATCTACTGTGCACGC | 2071 |
| 11470 | AGCAAAATCTACTGTGCACG | 2070 |

Hot Zones (Relative upstream location to gene start site)
735-915
1185-1275
1725-1815
2085-2175

### Examples

Genetic Code (5′ Upstream Region)

(SEQ ID NO: 11984)

AACTGGGCAGGCCTCAGGAAACTTACAATCATGGTAGAAGGTGAAGGGGA
AGCAAAGCACCTTCCTCACAAGGCGTCAGGAAGAAGTGCCAAGCAAAGGG
GGAAAAGCCCCTTGTAAAACTACCAGAACCTGTGAGAACTCAATCACTAT
CACAAGAACAGCATGAGGGAACCGCCCCTCGTGATTCAATTACCTCCACC
TGGTCTCTCCCTTGACACATGGGGATTATGGGTGTTACAATTCAAGATGA
GATTTGGGTGGGGACACAAAGCCTAACCATATCAAGGATCAAGTGGTGGG
TTGAAACTAACAGGATGAGATATATCAGATACAAACACAGGGTCCCATAT
TTGGGTTAAAATTCATAAATGATCAAAGCACAGGATGACAGATAATATAG
GTCATTTTAGATTATTGTGGCCAACAGATCACAGTGGGTAGTGTTATGAC
GAAGGGAGGGTCACAGTTACTACAGTTACAGATGGATTCTGGGTACAACA
TTTGCACTAAAGTGCCTTTGCCAAGGGAGGCAACAGTCTCGACATCCTGT
GGCCTGATCTACTTCAGGGACTGTGTCTTGTTCAGAGCATCACATTTGAA
GAGAACTTTGACCAAGGGGAATATGCCAGAAAAGGAAGTTCGGGATGCTG
AGGATCTTAGGAACTATGTCTAAACAAGATTCATTCACAGAAGTGGGAAT
GTCTATTTGGCAAAAAGAAAATACTACTTACATGGCTGTTGGAAGACCAG
CAATCACAAACTCAGTTTTTCAAAAGGCTGGGCAGAAACACAGATGAAAG
AAACAGGCCATGTTTAAGAAAAGATAAAAGCTCACGCATGATATGCCACT
AGAGAATCACCTAGCCTCAGTGTTGGCGGGGAGGCCTGGGGAGTCTTGAT
GTCTGAGAGTGACATTCTGATGATCACTGTCATGTGTAAATGTTGGCCTA
AAGCTGCCAATATTTTTGATTTAAGAGAAGCAAGAAATGCAAATTTTTAT
GCAGCATGTCTCAATTTTTAATTTTGGCAACTATTACAAAATGTTTAAAG
AGACTCTGTGCAGCCCAAATATAACATATCTATGGGCTGATGGCAGCCCA
GCGTTGCCAGTTCACAGGGTCTACAAGAGATGATTCTTAGTTTCAACAGG
GTGCAGTGCTGAAACGCGTGCACAGTAGATTTTGCTTCGGTTATGAAAGA
ACTTCCAAATATTTATGATTCATAGCCAGAGAAAAGGCTCTCTATCCAGG
TTCTGAACAATAGGAAATCATCAAGAGGATATTGGATGACAATATATGAA
AGATGTTATTTGAGAAAGGATTCTCTCCTGAGGCATAGATGTTGAACCAA
ATTCTATTAGTTATGCTTTTACAGCAAGATAGTGGTTTACAGCTTACAAA
AGGCTTGTACATCCTCTCATATTAAAAGTTATTAGAACAGTCCTTTGAAG
TAGAAAAGTAGGCATTTCTATTTTACAAACGAGTTGGCCGAGTATCTGAG
ATAGTAGATAACTCATAGAAGGTCATCCGGGAAACGGGGCAGCAGAACTG
GGATCGAATGACTCTGGTCATCCAACTCCAAATGCAAAAGTCTTTCTGCT
GCTGCTTCCTAGTTAAACTCTAAGGGTCTAAGACTCCATTCCTAGTTATG
GTCTCAACTACATTTGCTCATTGCTGTGAGGGGTCAACCCACCTCCCGGA
GTCCTCTCCTGCACATTCTCATGTTCCTGAAAGGCTTTTCTGTCCCTTCC
ACTACTCCCTGTAAGCTCCTGTGCTTCACAATTTCTTGTTGAATTTTTTC
TAATCTGACTCTATCAGTTATGGGAATGTTCCCTCAATTCTTAGTGCTCC
AAACCGGACTTGCTCTTGGCTTGTATTTGTCCAAAATATTTGTCTTCTCT
ATGTTTTCTACATGTTTGTCTTATAAGGACAAAAACCTGCCTTAGTTTAT
CCATGAACAAAGCCACGCATGCTAGTGGACACACACACACATGCGCGTGC
GCGCGCACACACACACACACACACATACACACAGAGACTTTGTATGTGAG
TAATGAATCATCAAATCATCATAATTTCTGGACTTGTATTAATAAGTCGG
CCAGGAGGAAAAGAATCTGCTGTCAATCATGGCTTCTGGTTCTCACAGTC
ATCTCTACTTTCTTCCAGCAAGTTTGGTTCTGTCAAAAACCAGCTGTCAG
CCTTGTTCCTGCATGCCCAATGCAGAAGAGTCAGTAAAGAAGATTTGGTT
CTCTGTATTTCAGGGGCATCAATGCCAGGTTGAAATATGCCATTCTGGCC
CAGCTCAGTGGCTCACACGTGTAATCCCAGCACTTTGGAAGGCCAAAGCG
GGTGGATTGCTTGAGCTCAGGAGTTCGAGACCAGCCTGGGCAAGAGGCTG
AGGTGGGAGGATGACCTGAGCCCGGGAGGTCAAGGCTGCAGCGAGCTGTG
ATCGTGCCACTGCACTCGAGCCAGGGCGTTGGAGTGAGACCCTGTCAAAA
AAAAAAAAAAAAAGGAAGGAAAAAAGGAAGGAAGGAAGGGAGGGAGGGAA
GATGCCATTCTTAGATTGAAGTGGACTTTATCTGGGCAGAACACACACAC
ACATACACACATGCACACACACATTGTGGAGAAATTGCTGACTAAGCAAA
GCTTCCAAATGACTTAGTTTGGCTAAAATGTAGGCTTTTAAAAATGTGAG
CACTGCCAAGGGTTTTTCCTTGTTGACCCATGGATCCATCAAGTGCAAAC
ATTTTCTAATGCACTATATTTAAGCCTGTGCAGCTAGATGTCATTCAACA
TGAAATACATTATTACAACTTGCATCTGTCTAAAATCTTGCATCTAAAAT
GAGAGACAAAAAATCTATAAAAATGGAAAACATGCATAGAAATATGTGAG
GGAGGAAAAAATTACCCCCAAGAATGTTAGTGCACGCAGTCACACAGGGA
GAAGACTATTTTTGTTTTGTTTTGATTGTTTTGTTTTGTTTTGGTTGTTT
TGTTTTGGTGACCTAACTGGTCAAATGACCTATTAAGAATATTTCATAGA
ACGAATGTTCCGATGCTCTAATCTCTCTAGACAAGGTTCATATTTGTATG
GGTTACTTATTCTCTCTTTGTTGACTAAGTCAATAATCAGAATCAGCAGG
TTTGCAGTCAGATTGGCAGGGATAAGCAGCCTAGCTCAGGAGAAGTGAGT
ATAAAAGCCCCAGGCTGGGAGCAGCCATCACAGAAGTCCACTCATTCTTG
GCAGGATG

[0466] CD68

[0467] CD68 (Cluster of Differentiation 68) is a glycoprotein that is expressed on monocytes/macrophages. It is often used as a marker for monocytes, histiocytes, giant cells, Kupffer cells, and osteoclasts. CD68 has been used to distinguish between diseases of similar appearance, e.g. (1) for monocytes of lymphoid origin and (2) macrophages to diagnose conditions related to proliferation or abnormality of these cells, such as malignant histiocytosis, histiocytic lymphoma, and Gaucher's disease. CD68 primarily localizes to lysosomes and endosomes with a smaller fraction circulating to the cell surface. It is a type I integral membrane protein with a heavily glycosylated extracellular domain and binds to tissue- and organ-specific lectins or selectins. The protein is also a member of the scavenger receptor family and has been reported to bind LDL. Scavenger receptors typically function to clear cellular debris, promote phagocytosis, and mediate the recruitment and -activation of macrophages. Alternative splicing of the gene results in multiple transcripts encoding different isoforms of CD68.

[0468] Protein: CD68 Gene: CD68 (Homo sapiens, chromosome 17, 7482805-7485429 [NCBI Reference Sequence: NC_{—}000017.10]; start site location: 7482996; strand: positive)

Gene Identification

| | |
|---|---|
| GeneID | 968 |
| HGNC | 1693 |
| MIM | 153634 |

Targeted Sequences

| | | Relative |
|---|---|---|
| | | upstream |
| Sequence | | location to |
| ID | Sequence (5′-3′) | gene start site |
| 11989 | CGAGAACATGGCTTTCCAGCGTCTG | 520 |

Hot Zones (Relative upstream location to gene start site)
1-600

Genetic Code (5′ Upstream Region)

(SEQ ID NO: 11985)

GCCACATTTGCCATATCGATTCTGCAGCAGATTGAATTAGATCTAAAAGC
CACCCAGGCCTTGGTCCTAGCACCCACTCGAGAATTGGCTCAGCAGGTAA
GAGTGGCTTCTATTCCCTCCTTCAGGGCTGATTTAGGGATGATGAGTATA
ATCCAAGGACCAGAGAAGTCTTCTCTGATCACCACCTTGGGAGGAAGACA
TGGGTGCCCTAACACTCTCGAGACCTGCTGGGTTAATTAAAAGCTATTTC
TTACCCAAACGTAACCATTGCTTCCTCCACCCATTTCCTGAGTCAAATGG
GAAAGCTGTTGGGTGAAGCCTGGCTGGCTGGGCAAGTTTGACTGTGTTCT
GAATAAGCACCTTCACTATGGGCTAAGAGATCCCTTGGTGTGGGGGTGAT
CTTACAGTAGTCAGAGCAGATGGACAGTCCTTTTCACCCTTGCTTAATAG
CCAGAGCTGTTTCATGCCTGGGGCACACACAATTCTAATGCTGGACTTTT
TCCTGGGTCATGCTGCAACACTGATGTCAGAGCATGTTTTTAAATGTTCT
GTGGCAGGGGCAGTGATTATTCTGGGTGTGGATAATGTAAGAAGTTACAG
CAGAGCTCCATTCTAAGGCACTTGGCTCTCAGTTTTCTCAGAGTGAACAT
GCCTCGTAGCTTGGGTCCTATGGCAGGAGTGCAATAGGACATGGATATGC
ATCACCTGTTCTATAAAACTGGTTGCTGGCTGGGTGTGGTGGCTCAACTC
GTATAATCCCAACACTTTGGGAGGCCAAGGCAGGCAGATCTCTTGAGATC
AGGAGTTGGAGACCAGCCTGGCCAACATAGTGAAACCCCGCTTCTACTAA
AAATACAAAAATTAGCCAGGCATGGTGGCGTGTGCCTTTTATCCCAGCTA
CTCGGGAAGCTCAGGCAGGAGAATTTAACCCAGGAGGTGGAGGTTGCAGT
GAGCTGAGATTGTGCCATTGCACTCCAGCCTGGGCAACGAGCAAAGCTCT
GTCTCAAAAAAAGAAAAAAAAAATGGTTGCTGCGTGATGAGGCAGTTGGT
CAAATTAGTTTTCAGAAGGTTAAGGGTTCTAAATATCTAGAGTAAAGAAA
CTGAATTAATTATCTGAGCGGCCTCATTGTGAATCACTGTACACTCAGGA
ACCAGACTGAGTTGAAATCCTGTCTTTGCCACCTATTGACAGCACGATCT
TAAGTGGATTTTAGCCTCTGCCTGTTTCTCAGCTGAATGTGAGTTTAATA
ATAGTGCATGCCCCAAAGTTGTTGGTTAGGAATCAATACATGAAAAACAT
TTAAGAATGGTGCCGGGCACAGTGGTAACTGACATATGAGCACCTGCCTC
TCTCTGCTCAGATACAGAAGGTGGTCATGGCACTAGGAGACTACATGGGC
GCCTCCTGTCACGCCTGTATCGGGGGCACCAACGTGCGTGCTGAGGTGCA
GAAACTGCAGATGGAAGCTCCCCACATCATCGTGGGTACCCCTGGCCGTG
TGTTTGATATGCTTAACCGGAGATACCTGTGTGAGTAATTCGGTTCTCCA
ATCCCCTGGGTCACTTTGCTCTTGTGCACGCTTTCCAGTCTTTCAGCGTA
AGCCAGAGTCATTCCCAAGGATGCTGGTTTCTCTCTGGGGGAAGAGCTGC
TCTGTGATGGAGCCCATGCGTGTCATCTGAGCCTCTGGCTTCCCTGCCAG
TGCAGCCCTGGCAGTGTCCTACTTCCCAGGGCTGTTGTCTGCCTGGCGGG
AAGGTCCTGGGCAAAGGATCAGTCTTTGTACTCTGAGAGCAGACTACTTG
GCTCCTCTCTGTTTTTTATCAGCGAAGTTGGATATATCTCTCCCACATTT
CCCTAATCATATGCTATATATTGGCTTTTTTTTTCTTCTCTAGCCCCCAA
ATACATCAAGATGTTTGTACTGGATGAAGCTGACGAAATGTTAAGCCGTG
GATTCAAGGACCAGATCTATGACATATTCCAAAAGCTCAACAGCAACACC
CAGGTGAGGGCAGTCTTGCTTGAATAGCTAATGATTCTTGAAAAATAGTA
AGTGCCAGGGGAACCATATACTGGATTCTTGAGCCTTTTTATGCATCTGC
TTCAGTTTTAGGTGTGGCTAGGGAAGGGAGCAGGCCTCAGGAAGGAACCA
GCACTCTAAGACTGGCCTTTTTTTCCACTAGGTAGTTTTGCTGTCAGCCA
CAATGCCTTCTGATGTGCTTGAGGTGACCAAGAAGTTCATGAGGGACCCC
ATTCGGATTCTTGTCAAGAAGGAAGAGTTGACCCTGGAGGGTATCCGCCA
GTTCTACATCAACGTGGAACGAGAGGTGGGGCCCAGTGCAGGAGGCGGGC
CTGGTAGTGAGTTGTTGGGTATAGCCCCTGACTGATTTTTGTCCCCCAAC
CTCCAGGAGTGGAAGCTGGACACACTATGTGACTTGTATGAAACCCTGAC
CATCACCCAGGCAGTCATCTTCATCAACACCCGGAGGAAGGTGGACTGGC
TCACCGAGAAGATGCATGCTCGAGATTTCACTGTATCCGCCATGGTGTGT
TTGCCCGCTGCCAGCCTGTTGTGGGTCTGCCCGTCAGAAGTGTCCTACTT
GAAGCCAGGGTTCCTGGAACCCAGGTGCCTACCTGGTCTGCTGCATATTT
GTTTTCTCTTCCAGCATGGAGATATGGACCAAAAGGAACGAGACGTGATT
ATGAGGGAGTTTCGTTCTGGCTCTAGCAGAGTTTTGATTACCACTGACCT
GCTGGTGAGTAGAGGGAACTGATAGCAAAGGCAGAAGGGAGGATCCAAGG
TGATTCCCTCTCCAAGGGGACATCAGTGCCTCTCAGGAAAGTAGCAGCTT
GGAATAGAATCTGGCATGCCTAAGGCCTTTGGGGAACTGGGATGCTTATT
TCCTCTGCCTTCCTTGGCTGCCCACATGGATGCCTAAGTGTCTTCCCTCC
GGGATAGAGTGTCCTCCGTGCACATGCTGAAGAGTTGTCTTTCTTGACGT
AGGCCAGAGGCATTGATGTGCAGCAGGTTTCTTTAGTCATCAACTATGAC
CTTCCCACCAACAGGGAAAACTATATCCACAGGTAAGCGTAGATCTGGAA
CACTCCCCTACCCCTTCACACCTGGCCCTCCCTGGGCTTAAAGCTCCTGA
TATTCCTCATCCCCTTCCTTGTTTTCCAGAATCGGTCGAGGTGGACGGTT
TGGCCGTAAAGGTGTGGCTATTAACATGGTGACAGAAGAAGACAAGAGGA
CTCTTCGAGACATTGAGACCTTCTACAACACCTCCATTGAGGAAATGCCC
CTCAATGTTGCTGACCTCATCTGAGGGGCTGTCCTGCCACCCAGCCCCAG
CCAGGGCTCAATCTCTGGGGGCTGAGGAGCAGCAGGAGGGGGGAGGGAAG
GGAGCCAAGGGATGGACATCTTGTCATTTTTTTTCTTTGAATAAATGTCA
CTTTTTGAGGCAAAAGAAGGAACCGTGAACATTTTAGACACCCTTTTCTT
TGGGGTAGGCTCTTGCCCCAGGCGCCGGCTCTTCTCCCAAAAAAAAAAAA
AAAACACTAATCCATTTCCCTAACCTAGTAACCTCCAGATCCCAGAGGCT
CTCCTCACCTCAGCTGAGCTCCTTTGAAAGTGATTCAAGGGACTATGTCA
CTCAGCCTCATTTGCTGGACCAAATCTGGAGGGAGAACCCCTAAAACCCC
TAAGTGAGGTTGCCCAGGGGGTTGTCCCCAGGTGGGGGGAAGCAGGGGAG
AGAAAATGGTAGCCATTTTTACATTGTTTTGTATAGTATTTATTGATTCA
GGAAACAAACACAAAATTCTGAATAAAATGACTTGGAAACTGCCTGTTTG
GGCTTCTCATTTCTTACCTCCCCTTCCCTCTCCCACCTGCTACTGGGTGC
ATCTCTGCTCCCCCCTTCCCCAGCAGATGGTTACCTTTGGGCTGTTGCTT
TCTTGTCACCATCTGAGTTCTCAGACGCTGGAAAGCCATGTTCTCGGCTC
TGTGAATGACAATGCTGACTGGAGTGCTGCCCCTCTGTAAAGGGCTGGGT
GTGGATGGTCACAAGCCCCTCACATGCCTCAGCCAAGAGGAAGTAGTACA
GGGGTCAGCCCAGAGGTCCAGGGGAAAGGAGTGGAAACCGATTTCCCCAC
CAAGGGAGGGGCCTGTACCTCAGCTGTTCCCATAGCTACTTGCCACAACT
GCCAAGCAAGTTTCGCTGAGTTTGACACATGGATCCCTGTGGATCAACTG
CCCTAGGACTCCGTTTGCACCCATGTGACACTGTTGACTTTGCCCTGATG
AAGCAGGGCCAACAGTCCCCTAACTTAATTACAAAAACTAATGACTAAGA
GAGAGGTGGCTAGAGCTGAGGCCCCTGAGTCAGGCTGTGGGTGGGATCAT
CTCCAGTACAGGAAGTGAGACTTTCATTTCCTCCTTTCCAAGAGAGGGCT
GAGGGAGCAGGGTTGAGCAACTGGTGCAGACAGCCTAGCTGGACTTTGGG
TGAGGCGGTTCAGCCATG

[0469] ALK

[0470] Anaplastic lymphoma kinase (ALK) also known as ALK tyrosine kinase receptor or CD246 (cluster of differentiation 246) is an enzyme encoded by the ALK gene. ALK is believed to have a putative transmembrane domain and an extracellular domain. ALK is believed to have oncogenic properties in through several ways: mutations, amplified copies, or fusion products with other genes. The t(2; 5) chromosomal translocation is associated with approximately 60% anaplastic large-cell lymphomas (ALCLs) and creates a fusion gene consisting of the ALK gene and the nucleophosmin (NPM) gene: the 3′ half of ALK, derived from chromosome 2 and coding for the catalytic domain, is fused to the 5′ portion of NPM from chromosome 5. The product of NPM-ALK or EML4-ALK fusion genes are oncogenic in lymphoma and non-small cell lung cancers, respectively. In a smaller fraction of ALCL patients, the 3′ half of ALK is fused to the 5′ sequence of TPM3 gene, encoding for tropomyosin 3. In rare cases, ALK is fused to other 5′ fusion partners, such as TFG, ATIC, CLTC1, TPM4, MSN, ALO17, MYH9.

[0471] Protein: ALK Gene: ALK (Homo sapiens, chromosome 2, 29415640-30144477 [NCBI Reference Sequence: NC_{—}000002.11]; start site location: 30143525; strand: negative)

Gene Identification

| | |
|---|---|
| GeneID | 238 |
| HGNC | 427 |
| MIM | 105590 |

Targeted Sequences

| | | Relative |
|---|---|---|
| | | upstream |
| Sequence | | location to |
| ID No: | Sequence (5′-3′) | gene start site |
| 11471 | CGCCGGAGGAGGCCGTTTACACTGC | 3 |
| 11530 | CGTGCGCGCAAGTCTCTTGCTTTCC | 132 |
| 11555 | CGCTCTCCGCGCCGAGTGCCGCGCC | 269 |
| 11621 | CGCCTTTTGCGTTCCTTTTGGCTCC | 482 |
| 11681 | CGCAGGCACTGGAGCGGCCCCGGCG | 701 |
| 11794 | CGACCCTCCGAACAGAGGCGGCGGG | 851 |
| 11825 | CGCGCTGCTGCCCGACCCACGCAGT | 1022 |
| 11901 | CGGGTCCGACTTCGGAAAAACAGGT | 1313 |
| 11923 | CGGCCTGTCGGGTAGCACAGGAGTT | 2022 |

Targeted Shift Sequences

| | | Relative |
|---|---|---|
| | | upstream |
| Sequence | | location to |
| ID No: | Sequence (5′-3′) | gene start site |
| 11471 | CGCCGGAGGAGGCCGTTTACACTGC | 3 |
| 11472 | GCCGGAGGAGGCCGTTTACA | 4 |
| 11473 | CCGGAGGAGGCCGTTTACAC | 5 |
| 11474 | CGGAGGAGGCCGTTTACACT | 6 |
| 11475 | GGAGGAGGCCGTTTACACTG | 7 |
| 11476 | GAGGAGGCCGTTTACACTGC | 8 |
| 11477 | AGGAGGCCGTTTACACTGCT | 9 |
| 11478 | GGAGGCCGTTTACACTGCTC | 10 |
| 11479 | GAGGCCGTTTACACTGCTCT | 11 |
| 11480 | AGGCCGTTTACACTGCTCTC | 12 |
| 11481 | GGCCGTTTACACTGCTCTCC | 13 |
| 11482 | GCCGTTTACACTGCTCTCCG | 14 |
| 11483 | CCGTTTACACTGCTCTCCGG | 15 |
| 11484 | CGTTTACACTGCTCTCCGGG | 16 |
| 11485 | GTTTACACTGCTCTCCGGGC | 17 |
| 11486 | TTTACACTGCTCTCCGGGCC | 18 |
| 11487 | TTACACTGCTCTCCGGGCCC | 19 |
| 11488 | TACACTGCTCTCCGGGCCCA | 20 |
| 11489 | ACACTGCTCTCCGGGCCCAG | 21 |
| 11490 | CACTGCTCTCCGGGCCCAGC | 22 |
| 11491 | ACTGCTCTCCGGGCCCAGCC | 23 |
| 11492 | CTGCTCTCCGGGCCCAGCCT | 24 |
| 11493 | TGCTCTCCGGGCCCAGCCTC | 25 |
| 11494 | GCTCTCCGGGCCCAGCCTCA | 26 |
| 11495 | CTCTCCGGGCCCAGCCTCAC | 27 |
| 11496 | TCTCCGGGCCCAGCCTCACC | 28 |
| 11497 | CTCCGGGCCCAGCCTCACCC | 29 |
| 11498 | TCCGGGCCCAGCCTCACCCT | 30 |
| 11499 | CCGGGCCCAGCCTCACCCTT | 31 |
| 11500 | CGGGCCCAGCCTCACCCTTC | 32 |
| 11501 | GGGCCCAGCCTCACCCTTCG | 33 |
| 11502 | GGCCCAGCCTCACCCTTCGC | 34 |
| 11503 | GCCCAGCCTCACCCTTCGCT | 35 |
| 11504 | CCCAGCCTCACCCTTCGCTC | 36 |
| 11505 | CCAGCCTCACCCTTCGCTCT | 37 |
| 11506 | CAGCCTCACCCTTCGCTCTC | 38 |
| 11507 | AGCCTCACCCTTCGCTCTCC | 39 |
| 11508 | GCCTCACCCTTCGCTCTCCC | 40 |
| 11509 | CCTCACCCTTCGCTCTCCCC | 41 |
| 11510 | CTCACCCTTCGCTCTCCCCG | 42 |
| 11511 | TCACCCTTCGCTCTCCCCGA | 43 |
| 11512 | CACCCTTCGCTCTCCCCGAG | 44 |
| 11513 | ACCCTTCGCTCTCCCCGAGA | 45 |
| 11514 | CCCTTCGCTCTCCCCGAGAT | 46 |
| 11515 | CCTTCGCTCTCCCCGAGATG | 47 |
| 11516 | CTTCGCTCTCCCCGAGATGG | 48 |
| 11517 | TTCGCTCTCCCCGAGATGGG | 49 |
| 11518 | TCGCTCTCCCCGAGATGGGA | 50 |
| 11519 | CGCTCTCCCCGAGATGGGAA | 51 |
| 11520 | GCTCTCCCCGAGATGGGAAG | 52 |
| 11521 | CTCTCCCCGAGATGGGAAGA | 53 |
| 11522 | TCTCCCCGAGATGGGAAGAG | 54 |
| 11523 | CTCCCCGAGATGGGAAGAGG | 55 |
| 11524 | TCCCCGAGATGGGAAGAGGC | 56 |
| 11525 | CCCCGAGATGGGAAGAGGCT | 57 |
| 11526 | CCCGAGATGGGAAGAGGCTC | 58 |
| 11527 | CCGAGATGGGAAGAGGCTCT | 59 |
| 11528 | CCGCCGGAGGAGGCCGTTTA | 2 |
| 11529 | CCCGCCGGAGGAGGCCGTTT | 1 |
| 11530 | CGTGCGCGCAAGTCTCTTGCTTTCC | 132 |
| 11531 | GTGCGCGCAAGTCTCTTGCT | 133 |
| 11532 | TGCGCGCAAGTCTCTTGCTT | 134 |
| 11533 | GCGCGCAAGTCTCTTGCTTT | 135 |
| 11534 | CGCGCAAGTCTCTTGCTTTC | 136 |
| 11535 | GCGCAAGTCTCTTGCTTTCC | 137 |
| 11536 | CGCAAGTCTCTTGCTTTCCC | 138 |
| 11537 | GCGTGCGCGCAAGTCTCTTG | 131 |
| 11538 | TGCGTGCGCGCAAGTCTCTT | 130 |
| 11539 | GTGCGTGCGCGCAAGTCTCT | 129 |
| 11540 | TGTGCGTGCGCGCAAGTCTC | 128 |
| 11541 | CTGTGCGTGCGCGCAAGTCT | 127 |
| 11542 | ACTGTGCGTGCGCGCAAGTC | 126 |
| 11543 | GACTGTGCGTGCGCGCAAGT | 125 |
| 11544 | GGACTGTGCGTGCGCGCAAG | 124 |
| 11545 | AGGACTGTGCGTGCGCGCAA | 123 |
| 11546 | GAGGACTGTGCGTGCGCGCA | 122 |
| 11547 | AGAGGACTGTGCGTGCGCGC | 121 |
| 11548 | CAGAGGACTGTGCGTGCGCG | 120 |
| 11549 | CCAGAGGACTGTGCGTGCGC | 119 |
| 11550 | TCCAGAGGACTGTGCGTGCG | 118 |
| 11551 | CTCCAGAGGACTGTGCGTGC | 117 |
| 11552 | TCTCCAGAGGACTGTGCGTG | 116 |
| 11553 | ATCTCCAGAGGACTGTGCGT | 115 |
| 11554 | GATCTCCAGAGGACTGTGCG | 114 |
| 11555 | CGCTCTCCGCGCCGAGTGCCGCGCC | 269 |
| 11556 | GCTCTCCGCGCCGAGTGCCG | 270 |
| 11557 | CTCTCCGCGCCGAGTGCCGC | 271 |
| 11558 | TCTCCGCGCCGAGTGCCGCG | 272 |
| 11559 | CTCCGCGCCGAGTGCCGCGC | 273 |
| 11560 | TCCGCGCCGAGTGCCGCGCC | 274 |
| 11561 | CCGCGCCGAGTGCCGCGCCC | 275 |
| 11562 | CGCGCCGAGTGCCGCGCCCC | 276 |
| 11563 | GCGCCGAGTGCCGCGCCCCC | 277 |
| 11564 | CGCCGAGTGCCGCGCCCCCG | 278 |
| 11565 | GCCGAGTGCCGCGCCCCCGT | 279 |
| 11566 | CCGAGTGCCGCGCCCCCGTC | 280 |
| 11567 | CGAGTGCCGCGCCCCCGTCT | 281 |
| 11568 | GAGTGCCGCGCCCCCGTCTG | 282 |
| 11569 | AGTGCCGCGCCCCCGTCTGT | 283 |
| 11570 | GTGCCGCGCCCCCGTCTGTA | 284 |
| 11571 | TGCCGCGCCCCCGTCTGTAG | 285 |
| 11572 | GCCGCGCCCCCGTCTGTAGC | 286 |
| 11573 | CCGCGCCCCCGTCTGTAGCT | 287 |
| 11574 | CGCGCCCCCGTCTGTAGCTC | 288 |
| 11575 | GCGCCCCCGTCTGTAGCTCG | 289 |
| 11576 | CGCCCCCGTCTGTAGCTCGC | 290 |
| 11577 | GCCCCCGTCTGTAGCTCGCT | 291 |
| 11578 | CCCCCGTCTGTAGCTCGCTG | 292 |
| 11579 | CCCCGTCTGTAGCTCGCTGC | 293 |
| 11580 | CCCGTCTGTAGCTCGCTGCG | 294 |
| 11581 | CCGTCTGTAGCTCGCTGCGC | 295 |
| 11582 | CGTCTGTAGCTCGCTGCGCT | 296 |
| 11583 | GTCTGTAGCTCGCTGCGCTC | 297 |
| 11584 | TCTGTAGCTCGCTGCGCTCG | 298 |
| 11585 | CTGTAGCTCGCTGCGCTCGG | 299 |
| 11586 | TGTAGCTCGCTGCGCTCGGT | 300 |
| 11587 | GTAGCTCGCTGCGCTCGGTA | 301 |
| 11588 | TAGCTCGCTGCGCTCGGTAC | 302 |
| 11589 | AGCTCGCTGCGCTCGGTACA | 303 |
| 11590 | GCTCGCTGCGCTCGGTACAG | 304 |
| 11591 | CTCGCTGCGCTCGGTACAGA | 305 |
| 11592 | TCGCTGCGCTCGGTACAGAG | 306 |
| 11593 | CGCTGCGCTCGGTACAGAGG | 307 |
| 11594 | GCTGCGCTCGGTACAGAGGA | 308 |
| 11595 | CTGCGCTCGGTACAGAGGAA | 309 |
| 11596 | TGCGCTCGGTACAGAGGAAC | 310 |
| 11597 | GCGCTCGGTACAGAGGAACT | 311 |
| 11598 | CGCTCGGTACAGAGGAACTA | 312 |
| 11599 | GCTCGGTACAGAGGAACTAC | 313 |
| 11600 | CTCGGTACAGAGGAACTACT | 314 |
| 11601 | TCGGTACAGAGGAACTACTA | 315 |
| 11602 | CGGTACAGAGGAACTACTAT | 316 |
| 11603 | CCGCTCTCCGCGCCGAGTGC | 268 |
| 11604 | CCCGCTCTCCGCGCCGAGTG | 267 |
| 11605 | TCCCGCTCTCCGCGCCGAGT | 266 |
| 11606 | CTCCCGCTCTCCGCGCCGAG | 265 |
| 11607 | CCTCCCGCTCTCCGCGCCGA | 264 |
| 11608 | GCCTCCCGCTCTCCGCGCCG | 263 |
| 11609 | AGCCTCCCGCTCTCCGCGCC | 262 |
| 11610 | GAGCCTCCCGCTCTCCGCGC | 261 |
| 11611 | TGAGCCTCCCGCTCTCCGCG | 260 |
| 11612 | TTGAGCCTCCCGCTCTCCGC | 259 |
| 11613 | CTTGAGCCTCCCGCTCTCCG | 258 |
| 11614 | CCTTGAGCCTCCCGCTCTCC | 257 |
| 11615 | ACCTTGAGCCTCCCGCTCTC | 256 |
| 11616 | GACCTTGAGCCTCCCGCTCT | 255 |
| 11617 | GGACCTTGAGCCTCCCGCTC | 254 |
| 11618 | GGGACCTTGAGCCTCCCGCT | 253 |
| 11619 | TGGGACCTTGAGCCTCCCGC | 252 |
| 11620 | CTGGGACCTTGAGCCTCCCG | 251 |
| 11621 | CGCCTTTTGCGTTCCTTTTGGCTCC | 482 |
| 11622 | GCCTTTTGCGTTCCTTTTGG | 483 |
| 11623 | CCTTTTGCGTTCCTTTTGGC | 484 |
| 11624 | CTTTTGCGTTCCTTTTGGCT | 485 |
| 11625 | TTTTGCGTTCCTTTTGGCTC | 486 |
| 11626 | TTTGCGTTCCTTTTGGCTCC | 487 |
| 11627 | TTGCGTTCCTTTTGGCTCCT | 488 |
| 11628 | TGCGTTCCTTTTGGCTCCTC | 489 |
| 11629 | GCGTTCCTTTTGGCTCCTCC | 490 |
| 11630 | CGTTCCTTTTGGCTCCTCCA | 491 |
| 11631 | CCGCCTTTTGCGTTCCTTTT | 481 |
| 11632 | GCCGCCTTTTGCGTTCCTTT | 480 |
| 11633 | GGCCGCCTTTTGCGTTCCTT | 479 |
| 11634 | TGGCCGCCTTTTGCGTTCCT | 478 |
| 11635 | CTGGCCGCCTTTTGCGTTCC | 477 |
| 11636 | CCTGGCCGCCTTTTGCGTTC | 476 |
| 11637 | TCCTGGCCGCCTTTTGCGTT | 475 |
| 11638 | GTCCTGGCCGCCTTTTGCGT | 474 |
| 11639 | TGTCCTGGCCGCCTTTTGCG | 473 |
| 11640 | CTGTCCTGGCCGCCTTTTGC | 472 |
| 11641 | GCTGTCCTGGCCGCCTTTTG | 471 |
| 11642 | CGCTGTCCTGGCCGCCTTTT | 470 |
| 11643 | ACGCTGTCCTGGCCGCCTTT | 469 |
| 11644 | CACGCTGTCCTGGCCGCCTT | 468 |
| 11645 | GCACGCTGTCCTGGCCGCCT | 467 |
| 11646 | TGCACGCTGTCCTGGCCGCC | 466 |
| 11647 | CTGCACGCTGTCCTGGCCGC | 465 |
| 11648 | GCTGCACGCTGTCCTGGCCG | 464 |
| 11649 | TGCTGCACGCTGTCCTGGCC | 463 |
| 11650 | CTGCTGCACGCTGTCCTGGC | 462 |
| 11651 | GCTGCTGCACGCTGTCCTGG | 461 |
| 11652 | AGCTGCTGCACGCTGTCCTG | 460 |
| 11653 | CAGCTGCTGCACGCTGTCCT | 459 |
| 11654 | CCAGCTGCTGCACGCTGTCC | 458 |
| 11655 | CCCAGCTGCTGCACGCTGTC | 457 |
| 11656 | TCCCAGCTGCTGCACGCTGT | 456 |
| 11657 | CTCCCAGCTGCTGCACGCTG | 455 |
| 11658 | GCTCCCAGCTGCTGCACGCT | 454 |
| 11659 | GGCTCCCAGCTGCTGCACGC | 453 |
| 11660 | CGGCTCCCAGCTGCTGCACG | 452 |
| 11661 | GCGGCTCCCAGCTGCTGCAC | 451 |
| 11662 | GGCGGCTCCCAGCTGCTGCA | 450 |
| 11663 | CGGCGGCTCCCAGCTGCTGC | 449 |
| 11664 | ACGGCGGCTCCCAGCTGCTG | 448 |
| 11665 | AACGGCGGCTCCCAGCTGCT | 447 |
| 11666 | GAACGGCGGCTCCCAGCTGC | 446 |
| 11667 | AGAACGGCGGCTCCCAGCTG | 445 |
| 11668 | GAGAACGGCGGCTCCCAGCT | 444 |
| 11669 | TGAGAACGGCGGCTCCCAGC | 443 |
| 11670 | CTGAGAACGGCGGCTCCCAG | 442 |
| 11671 | GCTGAGAACGGCGGCTCCCA | 441 |
| 11672 | GGCTGAGAACGGCGGCTCCC | 440 |
| 11673 | AGGCTGAGAACGGCGGCTCC | 439 |
| 11674 | AAGGCTGAGAACGGCGGCTC | 438 |
| 11675 | TAAGGCTGAGAACGGCGGCT | 437 |
| 11676 | TTAAGGCTGAGAACGGCGGC | 436 |
| 11677 | TTTAAGGCTGAGAACGGCGG | 435 |
| 11678 | TTTTAAGGCTGAGAACGGCG | 434 |
| 11679 | CTTTTAAGGCTGAGAACGGC | 433 |
| 11680 | ACTTTTAAGGCTGAGAACGG | 432 |
| 11681 | CGCAGGCACTGGAGCGGCCCCGGCG | 701 |
| 11682 | GCAGGCACTGGAGCGGCCCC | 702 |
| 11683 | CAGGCACTGGAGCGGCCCCG | 703 |
| 11684 | AGGCACTGGAGCGGCCCCGG | 704 |
| 11685 | GGCACTGGAGCGGCCCCGGC | 705 |
| 11686 | GCACTGGAGCGGCCCCGGCG | 706 |
| 11687 | CACTGGAGCGGCCCCGGCGG | 707 |
| 11688 | ACTGGAGCGGCCCCGGCGGC | 708 |
| 11689 | CTGGAGCGGCCCCGGCGGCA | 709 |
| 11690 | TGGAGCGGCCCCGGCGGCAG | 710 |
| 11691 | GGAGCGGCCCCGGCGGCAGC | 711 |
| 11692 | GAGCGGCCCCGGCGGCAGCA | 712 |
| 11693 | AGCGGCCCCGGCGGCAGCAG | 713 |
| 11694 | GCGGCCCCGGCGGCAGCAGC | 714 |
| 11695 | CGGCCCCGGCGGCAGCAGCT | 715 |
| 11696 | GGCCCCGGCGGCAGCAGCTG | 716 |
| 11697 | GCCCCGGCGGCAGCAGCTGA | 717 |
| 11698 | CCCCGGCGGCAGCAGCTGAG | 718 |
| 11699 | CCCGGCGGCAGCAGCTGAGG | 719 |
| 11700 | CCGGCGGCAGCAGCTGAGGG | 720 |
| 11701 | CGGCGGCAGCAGCTGAGGGC | 721 |
| 11702 | TCGCAGGCACTGGAGCGGCC | 700 |
| 11703 | TTCGCAGGCACTGGAGCGGC | 699 |
| 11704 | GTTCGCAGGCACTGGAGCGG | 698 |
| 11705 | AGTTCGCAGGCACTGGAGCG | 697 |
| 11706 | GAGTTCGCAGGCACTGGAGC | 696 |
| 11707 | AGAGTTCGCAGGCACTGGAG | 695 |
| 11708 | CAGAGTTCGCAGGCACTGGA | 694 |
| 11709 | TCAGAGTTCGCAGGCACTGG | 693 |
| 11710 | CTCAGAGTTCGCAGGCACTG | 692 |
| 11711 | CCTCAGAGTTCGCAGGCACT | 691 |
| 11712 | TCCTCAGAGTTCGCAGGCAC | 690 |
| 11713 | CTCCTCAGAGTTCGCAGGCA | 689 |
| 11714 | GCTCCTCAGAGTTCGCAGGC | 688 |
| 11715 | GGCTCCTCAGAGTTCGCAGG | 687 |
| 11716 | CGGCTCCTCAGAGTTCGCAG | 686 |
| 11717 | TCGGCTCCTCAGAGTTCGCA | 685 |
| 11718 | CTCGGCTCCTCAGAGTTCGC | 684 |
| 11719 | CCTCGGCTCCTCAGAGTTCG | 683 |
| 11720 | GCCTCGGCTCCTCAGAGTTC | 682 |
| 11721 | CGCCTCGGCTCCTCAGAGTT | 681 |
| 11722 | GCGCCTCGGCTCCTCAGAGT | 680 |
| 11723 | GGCGCCTCGGCTCCTCAGAG | 679 |
| 11724 | CGGCGCCTCGGCTCCTCAGA | 678 |
| 11725 | CCGGCGCCTCGGCTCCTCAG | 677 |
| 11726 | ACCGGCGCCTCGGCTCCTCA | 676 |
| 11727 | CACCGGCGCCTCGGCTCCTC | 675 |
| 11728 | TCACCGGCGCCTCGGCTCCT | 674 |
| 11729 | CTCACCGGCGCCTCGGCTCC | 673 |
| 11730 | TCTCACCGGCGCCTCGGCTC | 672 |
| 11731 | CTCTCACCGGCGCCTCGGCT | 671 |
| 11732 | GCTCTCACCGGCGCCTCGGC | 670 |
| 11733 | TGCTCTCACCGGCGCCTCGG | 669 |
| 11734 | TTGCTCTCACCGGCGCCTCG | 668 |
| 11735 | CTTGCTCTCACCGGCGCCTC | 667 |
| 11736 | CCTTGCTCTCACCGGCGCCT | 666 |
| 11737 | TCCTTGCTCTCACCGGCGCC | 665 |
| 11738 | GTCCTTGCTCTCACCGGCGC | 664 |
| 11739 | CGTCCTTGCTCTCACCGGCG | 663 |
| 11740 | GCGTCCTTGCTCTCACCGGC | 662 |
| 11741 | AGCGTCCTTGCTCTCACCGG | 661 |
| 11742 | CAGCGTCCTTGCTCTCACCG | 660 |
| 11743 | GCAGCGTCCTTGCTCTCACC | 659 |
| 11744 | TGCAGCGTCCTTGCTCTCAC | 658 |
| 11745 | TTGCAGCGTCCTTGCTCTCA | 657 |
| 11746 | TTTGCAGCGTCCTTGCTCTC | 656 |
| 11747 | GTTTGCAGCGTCCTTGCTCT | 655 |
| 11748 | AGTTTGCAGCGTCCTTGCTC | 654 |
| 11749 | AAGTTTGCAGCGTCCTTGCT | 653 |
| 11750 | CAAGTTTGCAGCGTCCTTGC | 652 |
| 11751 | GCAAGTTTGCAGCGTCCTTG | 651 |
| 11752 | CGCAAGTTTGCAGCGTCCTT | 650 |
| 11753 | GCGCAAGTTTGCAGCGTCCT | 649 |
| 11754 | TGCGCAAGTTTGCAGCGTCC | 648 |
| 11755 | CTGCGCAAGTTTGCAGCGTC | 647 |
| 11756 | GCTGCGCAAGTTTGCAGCGT | 646 |
| 11757 | CGCTGCGCAAGTTTGCAGCG | 645 |
| 11758 | GCGCTGCGCAAGTTTGCAGC | 644 |
| 11759 | CGCGCTGCGCAAGTTTGCAG | 643 |
| 11760 | CCGCGCTGCGCAAGTTTGCA | 642 |
| 11761 | CCCGCGCTGCGCAAGTTTGC | 641 |
| 11762 | CCCCGCGCTGCGCAAGTTTG | 640 |
| 11763 | CCCCCGCGCTGCGCAAGTTT | 639 |
| 11764 | GCCCCCGCGCTGCGCAAGTT | 638 |
| 11765 | AGCCCCCGCGCTGCGCAAGT | 637 |
| 11766 | CAGCCCCCGCGCTGCGCAAG | 636 |
| 11767 | CCAGCCCCCGCGCTGCGCAA | 635 |
| 11768 | CCCAGCCCCCGCGCTGCGCA | 634 |
| 11769 | TCCCAGCCCCCGCGCTGCGC | 633 |
| 11770 | ATCCCAGCCCCCGCGCTGCG | 632 |
| 11771 | AATCCCAGCCCCCGCGCTGC | 631 |
| 11772 | GAATCCCAGCCCCCGCGCTG | 630 |
| 11773 | TGAATCCCAGCCCCCGCGCT | 629 |
| 11774 | GTGAATCCCAGCCCCCGCGC | 628 |
| 11775 | CGTGAATCCCAGCCCCCGCG | 627 |
| 11776 | GCGTGAATCCCAGCCCCCGC | 626 |
| 11777 | GGCGTGAATCCCAGCCCCCG | 625 |
| 11778 | GGGCGTGAATCCCAGCCCCC | 624 |
| 11779 | TGGGCGTGAATCCCAGCCCC | 623 |
| 11780 | CTGGGCGTGAATCCCAGCCC | 622 |
| 11781 | TCTGGGCGTGAATCCCAGCC | 621 |
| 11782 | TTCTGGGCGTGAATCCCAGC | 620 |
| 11783 | CTTCTGGGCGTGAATCCCAG | 619 |
| 11784 | ACTTCTGGGCGTGAATCCCA | 618 |
| 11785 | AACTTCTGGGCGTGAATCCC | 617 |
| 11786 | GAACTTCTGGGCGTGAATCC | 616 |
| 11787 | TGAACTTCTGGGCGTGAATC | 615 |
| 11788 | CTGAACTTCTGGGCGTGAAT | 614 |
| 11789 | GCTGAACTTCTGGGCGTGAA | 613 |
| 11790 | TGCTGAACTTCTGGGCGTGA | 612 |
| 11791 | CTGCTGAACTTCTGGGCGTG | 611 |
| 11792 | CCTGCTGAACTTCTGGGCGT | 610 |
| 11793 | GCCTGCTGAACTTCTGGGCG | 609 |
| 11794 | CGACCCTCCGAACAGAGGCGGCGGG | 851 |
| 11795 | GACCCTCCGAACAGAGGCGG | 852 |
| 11796 | ACCCTCCGAACAGAGGCGGC | 853 |
| 11797 | CCCTCCGAACAGAGGCGGCG | 854 |
| 11798 | CCTCCGAACAGAGGCGGCGG | 855 |
| 11799 | CTCCGAACAGAGGCGGCGGG | 856 |
| 11800 | GCGACCCTCCGAACAGAGGC | 850 |
| 11801 | CGCGACCCTCCGAACAGAGG | 849 |
| 11802 | CCGCGACCCTCCGAACAGAG | 848 |
| 11803 | CCCGCGACCCTCCGAACAGA | 847 |
| 11804 | CCCCGCGACCCTCCGAACAG | 846 |
| 11805 | GCCCCGCGACCCTCCGAACA | 845 |
| 11806 | TGCCCCGCGACCCTCCGAAC | 844 |
| 11807 | GTGCCCCGCGACCCTCCGAA | 843 |
| 11808 | GGTGCCCCGCGACCCTCCGA | 842 |
| 11809 | CGGTGCCCCGCGACCCTCCG | 841 |
| 11810 | TCGGTGCCCCGCGACCCTCC | 840 |
| 11811 | CTCGGTGCCCCGCGACCCTC | 839 |
| 11812 | CCTCGGTGCCCCGCGACCCT | 838 |
| 11813 | ACCTCGGTGCCCCGCGACCC | 837 |
| 11814 | CACCTCGGTGCCCCGCGACC | 836 |
| 11815 | GCACCTCGGTGCCCCGCGAC | 835 |
| 11816 | AGCACCTCGGTGCCCCGCGA | 834 |
| 11817 | AAGCACCTCGGTGCCCCGCG | 833 |
| 11818 | AAAGCACCTCGGTGCCCCGC | 832 |
| 11819 | GAAAGCACCTCGGTGCCCCG | 831 |
| 11820 | GGAAAGCACCTCGGTGCCCC | 830 |
| 11821 | CGGAAAGCACCTCGGTGCCC | 829 |
| 11822 | CCGGAAAGCACCTCGGTGCC | 828 |
| 11823 | GCCGGAAAGCACCTCGGTGC | 827 |
| 11824 | GGCCGGAAAGCACCTCGGTG | 826 |
| 11825 | CGCGCTGCTGCCCGACCCACGCAGT | 1022 |
| 11826 | GCGCTGCTGCCCGACCCACG | 1023 |
| 11827 | CGCTGCTGCCCGACCCACGC | 1024 |
| 11828 | GCTGCTGCCCGACCCACGCA | 1025 |
| 11829 | CTGCTGCCCGACCCACGCAG | 1026 |
| 11830 | TGCTGCCCGACCCACGCAGT | 1027 |
| 11831 | GCTGCCCGACCCACGCAGTC | 1028 |
| 11832 | CTGCCCGACCCACGCAGTCC | 1029 |
| 11833 | TGCCCGACCCACGCAGTCCG | 1030 |
| 11834 | GCCCGACCCACGCAGTCCGG | 1031 |
| 11835 | CCCGACCCACGCAGTCCGGC | 1032 |
| 11836 | CCGACCCACGCAGTCCGGCC | 1033 |
| 11837 | CGACCCACGCAGTCCGGCCT | 1034 |
| 11838 | GACCCACGCAGTCCGGCCTC | 1035 |
| 11839 | ACCCACGCAGTCCGGCCTCG | 1036 |
| 11840 | CCCACGCAGTCCGGCCTCGC | 1037 |
| 11841 | CCACGCAGTCCGGCCTCGCC | 1038 |
| 11842 | CACGCAGTCCGGCCTCGCCC | 1039 |
| 11843 | ACGCAGTCCGGCCTCGCCCC | 1040 |
| 11844 | CGCAGTCCGGCCTCGCCCCG | 1041 |
| 11845 | GCAGTCCGGCCTCGCCCCGC | 1042 |
| 11846 | CAGTCCGGCCTCGCCCCGCC | 1043 |
| 11847 | AGTCCGGCCTCGCCCCGCCC | 1044 |
| 11848 | GTCCGGCCTCGCCCCGCCCC | 1045 |
| 11849 | TCCGGCCTCGCCCCGCCCCA | 1046 |
| 11850 | CCGGCCTCGCCCCGCCCCAC | 1047 |
| 11851 | CGGCCTCGCCCCGCCCCACC | 1048 |
| 11852 | GGCCTCGCCCCGCCCCACCC | 1049 |
| 11853 | GCCTCGCCCCGCCCCACCCG | 1050 |
| 11854 | CCTCGCCCCGCCCCACCCGC | 1051 |
| 11855 | CTCGCCCCGCCCCACCCGCA | 1052 |
| 11856 | TCGCCCCGCCCCACCCGCAC | 1053 |
| 11857 | CGCCCCGCCCCACCCGCACC | 1054 |
| 11858 | GCCCCGCCCCACCCGCACCC | 1055 |
| 11859 | CCCCGCCCCACCCGCACCCT | 1056 |
| 11860 | CCCGCCCCACCCGCACCCTC | 1057 |
| 11861 | CCGCCCCACCCGCACCCTCC | 1058 |
| 11862 | CGCCCCACCCGCACCCTCCA | 1059 |
| 11863 | GCCCCACCCGCACCCTCCAA | 1060 |
| 11864 | CCCCACCCGCACCCTCCAAC | 1061 |
| 11865 | CCCACCCGCACCCTCCAACC | 1062 |
| 11866 | CCACCCGCACCCTCCAACCA | 1063 |
| 11867 | CACCCGCACCCTCCAACCAA | 1064 |
| 11868 | ACCCGCACCCTCCAACCAAT | 1065 |
| 11869 | CCCGCACCCTCCAACCAATG | 1066 |
| 11870 | CCGCACCCTCCAACCAATGG | 1067 |
| 11871 | CGCACCCTCCAACCAATGGC | 1068 |
| 11872 | GCACCCTCCAACCAATGGCG | 1069 |
| 11873 | CACCCTCCAACCAATGGCGT | 1070 |
| 11874 | ACCCTCCAACCAATGGCGTG | 1071 |
| 11875 | CCCTCCAACCAATGGCGTGG | 1072 |
| 11876 | CCTCCAACCAATGGCGTGGC | 1073 |
| 11877 | CTCCAACCAATGGCGTGGCT | 1074 |
| 11878 | TCCAACCAATGGCGTGGCTC | 1075 |
| 11879 | CCAACCAATGGCGTGGCTCG | 1076 |
| 11880 | CAACCAATGGCGTGGCTCGA | 1077 |
| 11881 | AACCAATGGCGTGGCTCGAT | 1078 |
| 11882 | ACCAATGGCGTGGCTCGATC | 1079 |
| 11883 | CCGCGCTGCTGCCCGACCCA | 1021 |
| 11884 | TCCGCGCTGCTGCCCGACCC | 1020 |
| 11885 | CTCCGCGCTGCTGCCCGACC | 1019 |
| 11886 | ACTCCGCGCTGCTGCCCGAC | 1018 |
| 11887 | AACTCCGCGCTGCTGCCCGA | 1017 |
| 11888 | CAACTCCGCGCTGCTGCCCG | 1016 |
| 11889 | CCAACTCCGCGCTGCTGCCC | 1015 |
| 11890 | GCCAACTCCGCGCTGCTGCC | 1014 |
| 11891 | AGCCAACTCCGCGCTGCTGC | 1013 |
| 11892 | AAGCCAACTCCGCGCTGCTG | 1012 |
| 11893 | CAAGCCAACTCCGCGCTGCT | 1011 |
| 11894 | ACAAGCCAACTCCGCGCTGC | 1010 |
| 11895 | CACAAGCCAACTCCGCGCTG | 1009 |
| 11896 | TCACAAGCCAACTCCGCGCT | 1008 |
| 11897 | CTCACAAGCCAACTCCGCGC | 1007 |
| 11898 | GCTCACAAGCCAACTCCGCG | 1006 |
| 11899 | GGCTCACAAGCCAACTCCGC | 1005 |
| 11900 | GGGCTCACAAGCCAACTCCG | 1004 |
| 11901 | CGGGTCCGACTTCGGAAAAACAGGT | 1313 |
| 11902 | GGGTCCGACTTCGGAAAAAC | 1314 |
| 11903 | GGTCCGACTTCGGAAAAACA | 1315 |
| 11904 | GTCCGACTTCGGAAAAACAG | 1316 |
| 11905 | TCCGACTTCGGAAAAACAGG | 1317 |
| 11906 | CCGACTTCGGAAAAACAGGT | 1318 |
| 11907 | CGACTTCGGAAAAACAGGTT | 1319 |
| 11908 | GACTTCGGAAAAACAGGTTC | 1320 |
| 11909 | ACTTCGGAAAAACAGGTTCC | 1321 |
| 11910 | CTTCGGAAAAACAGGTTCCA | 1322 |
| 11911 | TTCGGAAAAACAGGTTCCAG | 1323 |
| 11912 | TCGGAAAAACAGGTTCCAGA | 1324 |
| 11913 | ACGGGTCCGACTTCGGAAAA | 1312 |
| 11914 | AACGGGTCCGACTTCGGAAA | 1311 |
| 11915 | AAACGGGTCCGACTTCGGAA | 1310 |
| 11916 | TAAACGGGTCCGACTTCGGA | 1309 |
| 11917 | TTAAACGGGTCCGACTTCGG | 1308 |
| 11918 | ATTAAACGGGTCCGACTTCG | 1307 |
| 11919 | GATTAAACGGGTCCGACTTC | 1306 |
| 11920 | AGATTAAACGGGTCCGACTT | 1305 |
| 11921 | GAGATTAAACGGGTCCGACT | 1304 |
| 11922 | AGAGATTAAACGGGTCCGAC | 1303 |
| 11923 | CGGCCTGTCGGGTAGCACAGGAGTT | 2022 |
| 11924 | GGCCTGTCGGGTAGCACAGG | 2023 |
| 11925 | GCCTGTCGGGTAGCACAGGA | 2024 |
| 11926 | CCTGTCGGGTAGCACAGGAG | 2025 |
| 11927 | CTGTCGGGTAGCACAGGAGT | 2026 |
| 11928 | TGTCGGGTAGCACAGGAGTT | 2027 |
| 11929 | GTCGGGTAGCACAGGAGTTT | 2028 |
| 11930 | TCGGGTAGCACAGGAGTTTT | 2029 |
| 11931 | CGGGTAGCACAGGAGTTTTC | 2030 |
| 11932 | ACGGCCTGTCGGGTAGCACA | 2021 |
| 11933 | CACGGCCTGTCGGGTAGCAC | 2020 |
| 11934 | TCACGGCCTGTCGGGTAGCA | 2019 |
| 11935 | CTCACGGCCTGTCGGGTAGC | 2018 |
| 11936 | GCTCACGGCCTGTCGGGTAG | 2017 |
| 11937 | AGCTCACGGCCTGTCGGGTA | 2016 |
| 11938 | GAGCTCACGGCCTGTCGGGT | 2015 |
| 11939 | GGAGCTCACGGCCTGTCGGG | 2014 |
| 11940 | TGGAGCTCACGGCCTGTCGG | 2013 |
| 11941 | CTGGAGCTCACGGCCTGTCG | 2012 |
| 11942 | TCTGGAGCTCACGGCCTGTC | 2011 |
| 11943 | CTCTGGAGCTCACGGCCTGT | 2010 |
| 11944 | TCTCTGGAGCTCACGGCCTG | 2009 |
| 11945 | CTCTCTGGAGCTCACGGCCT | 2008 |
| 11946 | CCTCTCTGGAGCTCACGGCC | 2007 |
| 11947 | TCCTCTCTGGAGCTCACGGC | 2006 |
| 11948 | ATCCTCTCTGGAGCTCACGG | 2005 |
| 11949 | GATCCTCTCTGGAGCTCACG | 2004 |

Hot Zones (Relative upstream location to gene start site)
1-550
650-950
1000-1100
1250-1400
1950-2100

### Examples

Genetic Code (5′ Upstream Region)

(SEQ ID NO: 11986)

TCTCTGCAGCCCCCTAGTGGCCATTGGGTGCAGCAGACGATTCACAGTTA
ACTGACAAATTAACTGGAGTCAGTAATGCCTTTGGTCAAGAATTGTATAG
AGAAATAGGGAAAGGCTGGAGTTTTAGTCTTTTTTCATATTTCAAATAAA
AATTCCTCTTCCAGTAGGTATGTCAGAAAAATCTGATGAAAATCAAACAT
ATATTGTACCAGGAAAGTATTAACTACCATAGCATTTTCCTCCCTCTTTT
CTTTCTTTTCCACCCTTCCTCCACCAAGATAGGAGCATATTTTCTTCTCG
GGTGAGATAATTCTTTGCCCTGAAACTTGTAAAGTCAGTGTATCCAGTGT
GACTTCCAGAGAGAGGGCAGATGCCTGTCAAATTAAGTGAGTTGCCAAAC
ATAGAGCAGGAAGAAAGCCATTCCGAGAATCAATATTCCTTTGTTACTGG
GTCTTCCACTTGCCAAGGCATTGCCACAAAGCTGGAAAGGCCCAGCTCCT
AGGAGAACAGAGGTTCCACCTGGCCACTATCTCCTGTGGGGTGGTAGGCA
AGTTACTGCGGCCCCCAGGAGCTCAGTGAGGGAGGTTCAATGTGACACTG
TGCTCTGATCCTGTGAGAAAACTCCTGTGCTACCCGACAGGCCGTGAGCT
CCAGAGAGGATCTTGCCTTATTCTTAGCTTCAACAGTCAGCCCAAGGCCT
GACAACCAGCCTTTAAGAAGGAATCAAGGGGATTTGTGTGACCCAAAGAT
GGTAGTTTTGTCTGAGGATCTAGTGAACCACTTGTTATAAAAACAGCTAT
TATGAGTTCTGTGTTGGCAGCTCAGGAGAGACGAAAGGAAAGGGAGAGGA
GAGGTACAGCCATTACAGGTGAGTAAAAAAGGCCTAAGGTTCTGAACCCT
CATTCCCAAGATTGTGGGCAAACAATTAAATGCTCTGCAACTCAGTTTCT
GCATCTGTAAATCTGGAATTAAAATGTTTGCCTTACAGAGACTAGGGGAG
GTTACACATGTTCAGACACCATTCTGAGAAAACAGAGCGACTGACAGGGG
TCTGAAAGGTATTTGTTGTAGCTGCAGAACAACTCTGCCAGACCAAGACC
ATCCATCCCTCTCTGCCCCCCTATTCCCAAATTCTCCTGTGTGGACGGCA
GGACTCCTAAGCTCCCAGGAATGCATTCAAATAATAGATGGGTCAGAAAA
TATTCTGTCTCAGGGCCTTAATACAAGCTGTTCTCAGATTTGCCAGTGTC
GCGCTGCCACCCTCTCCCCACTTCCTCCTCCCTTCCCACTCCCCCCTCCC
TTCCCCTCTCCTCCAGTTTTATTCTGGAACCTGTTTTTCCGAAGTCGGAC
CCGTTTAATCTCTTAAATGTATAATTAGGGAGAGTGCTTGATTGCAAAGG
CCTCTTCCAGTTCTCACATTTGCTCCCTTTCACACTGCAGAGAAATAGGG
CAGGGAATCTAGAGGAGGGGAAGAACAAGAGACTGGAGAGGGAACAGAGG
GAGGGTGGGGCGGGCTCACTCCTTTTCTCAATGAATGCCGAGGCCTCTGC
AGATTTGCATAGGAGCCGATCGAGCCACGCCATTGGTTGGAGGGTGCGGG
TGGGGCGGGGCGAGGCCGGACTGCGTGGGTCGGGCAGCAGCGCGGAGTTG
GCTTGTGAGCCCCGCCCCCTCCGGGCCCCGCCCCCTCCCTGCGCGCGCTC
GCGCGGCTCAGCCAGCTGCAAGTGGCGGGCGCCCAGGCAGATGCGATCCA
GCGGCTCTGGGGGCGGCAGCGGTGGTAGCAGCTGGTACCTCCCGCCGCCT
CTGTTCGGAGGGTCGCGGGGCACCGAGGTGCTTTCCGGCCGCCCTCTGGT
CGGCCACCCAAAGCCGCGGGCGCTGATGATGGGTGAGGAGGGGGCGGCAA
GATTTCGGGCGCCCCTGCCCTGAACGCCCTCAGCTGCTGCCGCCGGGGCC
GCTCCAGTGCCTGCGAACTCTGAGGAGCCGAGGCGCCGGTGAGAGCAAGG
ACGCTGCAAACTTGCGCAGCGCGGGGGCTGGGATTCACGCCCAGAAGTTC
AGCAGGCAGACAGTCCGAAGCCTTCCCGCAGCGGAGAGATAGCTTGAGGG
TGCGCAAGACGGCAGCCTCCGCCCTCGGTTCCCGCCCAGACCGGGCAGAA
GAGCTTGGAGGAGCCAAAAGGAACGCAAAAGGCGGCCAGGACAGCGTGCA
GCAGCTGGGAGCCGCCGTTCTCAGCCTTAAAAGTTGCAGAGATTGGAGGC
TGCCCCGAGAGGGGACAGACCCCAGCTCCGACTGCGGGGGGCAGGAGAGG
ACGGTACCCAACTGCCACCTCCCTTCAACCATAGTAGTTCCTCTGTACCG
AGCGCAGCGAGCTACAGACGGGGGCGCGGCACTCGGCGCGGAGAGCGGGA
GGCTCAAGGTCCCAGCCAGTGAGCCCAGTGTGCTTGAGTGTCTCTGGACT
CGCCCCTGAGCTTCCAGGTCTGTTTCATTTAGACTCCTGCTCGCCTCCGT
GCAGTTGGGGGAAAGCAAGAGACTTGCGCGCACGCACAGTCCTCTGGAGA
TCAGGTGGAAGGAGCCGCTGGGTACCAAGGACTGTTCAGAGCCTCTTCCC
ATCTCGGGGAGAGCGAAGGGTGAGGCTGGGCCCGGAGAGCAGTGTAAACG
GCCTCCTCCGGCGGGA
TG

[0473] Musashi Homolog 2 (MSI2)

[0474] Musashi homolog 2 is located on chromosome 17 and belongs to RNA-binding proteins of the Musashi family expressed in stem cell compartments and in aggressive tumors. MSI2 is the predominant form expressed in hematopoietic stem cells (HSCs), and its knockdown leads to reduced engraftment and depletion of HSCs in vivo. Overexpression of human MSI2 in a mouse model increases HSC cell cycle progression and cooperates with the chronic myeloid leukemia-associated BCR-ABL1 oncoprotein to induce an aggressive leukemia. MSI2 is overexpressed in human myeloid leukemia cell lines, and its depletion leads to decreased proliferation and increased apoptosis. Expression levels in human myeloid leukemia directly correlate with decreased survival in patients with the disease.

[0475] Protein: MSI2 Gene: MSI2 (Homo sapiens, chromosome 17, 57256570-57684689 [NCBI Reference Sequence: NC_{—}000017.11]; start site location: 57256743; strand: positive)

Gene Identification

| | |
|---|---|
| GeneID | 124540 |
| HGNC | 18585 |
| HPRD | 07438 |
| MIM | 607897 |

Targeted Sequences

| | | Relative |
|---|---|---|
| | | upstream |
| | | location |
| Sequence | | to gene |
| ID No: | Sequence (5′-3′) | start site |
| 11989 | CGGTGACGTCACGCACCCCCGTGCG | 360 |
| 12058 | CGGATACAATTACCCATATTGT | 1535 |
| 12059 | GACTCAGTTGCTAACAACCATGAGCG | 10624 |
| 12060 | CAGTTGCTAACAACCATGAGCG | 10628 |
| 12061 | CATGAAAATTTCACCAAGTATAAATTAC | 10909 |
| 12062 | CACCAAGTATAAATTACAGGTCT | 10920 |

Targeted Shift Sequences

| | | Relative |
|---|---|---|
| | | upstream |
| | | location |
| Sequence | | to gene |
| ID No: | Sequence (5′-3′) | start site |
| 11989 | CGGTGACGTCACGCACCCCCGTGCG | 354 |
| 11990 | GGTGACGTCACGCACCCCCG | 355 |
| 11991 | GTGACGTCACGCACCCCCGT | 356 |
| 11992 | TGACGTCACGCACCCCCGTG | 357 |
| 11993 | GACGTCACGCACCCCCGTGC | 358 |
| 11994 | ACGTCACGCACCCCCGTGCG | 359 |
| 11995 | CGTCACGCACCCCCGTGCGG | 360 |
| 11996 | GTCACGCACCCCCGTGCGGC | 361 |
| 11997 | TCACGCACCCCCGTGCGGCC | 362 |
| 11998 | CACGCACCCCCGTGCGGCCC | 363 |
| 11999 | ACGCACCCCCGTGCGGCCCC | 364 |
| 12000 | CGCACCCCCGTGCGGCCCCC | 365 |
| 12001 | GCACCCCCGTGCGGCCCCCG | 366 |
| 12002 | CACCCCCGTGCGGCCCCCGC | 367 |
| 12003 | ACCCCCGTGCGGCCCCCGCC | 368 |
| 12004 | CCCCCGTGCGGCCCCCGCCT | 369 |
| 12005 | CCCCGTGCGGCCCCCGCCTG | 370 |
| 12006 | CCCGTGCGGCCCCCGCCTGC | 371 |
| 12007 | CCGTGCGGCCCCCGCCTGCC | 372 |
| 12008 | CGTGCGGCCCCCGCCTGCCC | 373 |
| 12009 | GTGCGGCCCCCGCCTGCCCG | 374 |
| 12010 | TGCGGCCCCCGCCTGCCCGC | 375 |
| 12011 | GCGGCCCCCGCCTGCCCGCG | 376 |
| 12012 | CGGCCCCCGCCTGCCCGCGC | 377 |
| 12013 | GGCCCCCGCCTGCCCGCGCG | 378 |
| 12014 | GCCCCCGCCTGCCCGCGCGC | 379 |
| 12015 | CCCCCGCCTGCCCGCGCGCG | 380 |
| 12016 | CCCCGCCTGCCCGCGCGCGC | 381 |
| 12017 | CCCGCCTGCCCGCGCGCGCA | 382 |
| 12018 | CCGCCTGCCCGCGCGCGCAC | 383 |
| 12019 | CGCCTGCCCGCGCGCGCACA | 384 |
| 12020 | GCCTGCCCGCGCGCGCACAC | 385 |
| 12021 | CCTGCCCGCGCGCGCACACT | 386 |
| 12022 | CTGCCCGCGCGCGCACACTC | 387 |
| 12023 | TGCCCGCGCGCGCACACTCG | 388 |
| 12024 | GCCCGCGCGCGCACACTCGG | 389 |
| 12025 | CCCGCGCGCGCACACTCGGC | 390 |
| 12026 | CCGCGCGCGCACACTCGGCC | 391 |
| 12027 | CGCGCGCGCACACTCGGCCC | 392 |
| 12028 | GCGCGCGCACACTCGGCCCC | 393 |
| 12029 | CGCGCGCACACTCGGCCCCC | 394 |
| 12030 | GCGCGCACACTCGGCCCCCC | 395 |
| 12031 | CGCGCACACTCGGCCCCCCA | 396 |
| 12032 | GCGCACACTCGGCCCCCCAC | 397 |
| 12033 | CGCACACTCGGCCCCCCACG | 398 |
| 12034 | GCACACTCGGCCCCCCACGG | 399 |
| 12035 | CACACTCGGCCCCCCACGGC | 400 |
| 12036 | ACACTCGGCCCCCCACGGCC | 401 |
| 12037 | CCGGTGACGTCACGCACCCC | 353 |
| 12038 | GCCGGTGACGTCACGCACCC | 352 |
| 12039 | TGCCGGTGACGTCACGCACC | 351 |
| 12040 | ATGCCGGTGACGTCACGCAC | 350 |
| 12041 | AATGCCGGTGACGTCACGCA | 349 |
| 12042 | CAATGCCGGTGACGTCACGC | 348 |
| 12043 | CCAATGCCGGTGACGTCACG | 347 |
| 12044 | ACCAATGCCGGTGACGTCAC | 346 |
| 12045 | AACCAATGCCGGTGACGTCA | 345 |
| 12046 | TAACCAATGCCGGTGACGTC | 344 |
| 12047 | GTAACCAATGCCGGTGACGT | 343 |
| 12048 | TGTAACCAATGCCGGTGACG | 342 |
| 12049 | GTGTAACCAATGCCGGTGAC | 341 |
| 12050 | CGTGTAACCAATGCCGGTGA | 340 |
| 12051 | TCGTGTAACCAATGCCGGTG | 339 |
| 12052 | GTCGTGTAACCAATGCCGGT | 338 |
| 12053 | CGTCGTGTAACCAATGCCGG | 337 |
| 12054 | ACGTCGTGTAACCAATGCCG | 336 |
| 12055 | AACGTCGTGTAACCAATGCC | 335 |
| 12056 | GAACGTCGTGTAACCAATGC | 334 |
| 12057 | AGAACGTCGTGTAACCAATG | 333 |
| 12058 | CGGATACAATTACCCATATTGT | 1535 |
| 12059 | GACTCAGTTGCTAACAACCATGAGCG | 10624 |
| 12060 | CAGTTGCTAACAACCATGAGCG | 10628 |
| 12061 | CATGAAAATTTCACCAAGTATAAATTAC | 10909 |
| 12062 | CACCAAGTATAAATTACAGGTCT | 10920 |

Hot Zones (Relative upstream location to gene start site)
1-450
1450-1600
10000-11500

### Examples

Genetic Code (5′ Upstream Region)

(SEQ ID NO: 1364)

ATTTCTCAAAGAACTAAAAATAGAACTGCCATTTGATCCAGCAATCCCAC
TACTGGTAACCTTTAACAGTATATACCCAAAGGAAAAGAAATCAGTATAT
CAAAAAGATACCCATACTCGTATGTTTATCGTAGCACTATTCACAATAGC
AAAGATATGGAATCAACCTAAGTGTCCATCAACAGAGGATTGGATAAAGA
AAATGTGATACATGTACACAATAAAGTACTACTCAGTCATTAAAAAAATC
AAACAGCAGCAATATGGATGGAATTGCTGGAAGACATTATCCCCAGGTGA
AACAAGCCGGAGACAGAAAGACAAACACTGCGTGTTTTCACTTATAAGTG
GGAGCTAAATCATGTGTACACATGGATGTAGGGTGTGGAATAACAGATAA
TGGAGACTTGAAAGAGTGAGGGGGCCAGGCATGGTGGCTCATGCCTGTAA
TCCCAGCACTTTGGGAGGCCGAGGTGGGTGGATCATCTGAGGTCAGGAGT
TTGAGACCAGCCTGGCCAACATGGTGAAACCTTGTCTCTACTAAAAATAC
AAAAAGTAGCCGGGCATGGTGGTGTGTGCCTGTAATCCTAGCTACTCAGG
AGGCTGAAGCAGGAGAATAGCTTGAACCCGGGAGGGTGGGAGGTTGCAGT
GAGCCGAGATCACGCCACTGCACTCCAGCCTGGGCAACAAGAGCGAAACT
CGGTCTCGAAAAAAGAAAAAAAAAAAAAAAAGAAAGGGTGAGGGGATGGG
GGAAGTGAATGATGAGAGACTACTTAATGGGTACAATGTATTTGAGTGAT
GAATACCCTAAAAACCCTGATTTTACCACTATGTGATCTATGCATGTAAC
AAAATTATACACGTAACTCATAAATTTACATAAATAAACTAAAAAATAAT
TTTTAAGTTAGCAAACAACTTTTTTAAAAGAAGAATAAGCAGATACCCCA
CATAGTGAGTAGACAAAGAACATCCCAGGCAAAAGGAACAAACAGCATCT
GCAAAGGGCTTGAAGAAGGAAACAGCTTGTTTTGTTTAAGAAATGATAGA
AGGCTGGGCGTGGTGGCTCACGCCTGTAATCCTAGCACTTTGAGAGGCCA
AGGAAGGTAGATTGCTTGAGCCTAAGAGTTTGGGACCAGCCTGGGCAACG
TGGCAAAACCGCCAAAATTAACCGGGCTTGGTGGCATGCAGCTGTAGTCC
CAGCTACTCAGGAGGCTGAGGTGGGAGGATCACCTGAGCCCAGGTGGTCA
AGGCTGTGGTGTGCTGTGATCATGCTACTGCACTCCAGCCTGGATGACAG
AGTGAGAACCTGTCTAAAAAATTAATTAATTAATTAAAAAAAATGAAAGA
GATGATAGAAGATGGTGGTGTAATGTGAGGTTGGAAAAGCAGACCTAGAA
CATACCACGGAAGGTCTTTTAGGTGACAGCAAGGGGGTTCGATGCAGTGG
GAAACCGCTGGAGGGATCCGACCTGCATCCCATAAAGACCTCTTTGGCTA
CTGTGAGGGAAACAGACATTTTGGGAAGGTTCCAGAAGTCAAGGTAGAGG
AAGACTAGTCTATAAAGCGGACCGCCTTTGTGAAAAATCAACCTATGAAA
GAAGCCAACATACAAAAGATACACTGGAAGTGATCAAAGACTTCCAAGAG
CAGCCGGGAGGTGGAATCTCAAGTCCAGATGTTGAATGAGTTGGGTGATT
GTATGGGACAGAACCAGAAGCTGATGAGGGGCCCAGGATGCAGATCAAAG
AGATGGGATGAGCAGGCAAATGCCATTTCTTTTCATTCCGCCTATTTTGC
TTGAGTCACCAGTTTGGTAAGGGGAGAGTTTCAACCATCTGCAAGTAATC
CAAATGCTTTTACTAACCTGCCTACCCATCCACACCCCCACCAAAAAAAA
AAAAAAAGAAAGAAAGAAAGAAAAATAAGAAGCCAACCCCAGAGCTTGTA
CGCCTGCATTCTCCACAATCATTTCTCTGTGTTACAGCTCTTGTCATCTT
ACATTATACATGAATAACTAATCAACCAAACACAAACCCACTGATGAAAA
AAAACGCATGTTGGATCTAGAATGTGAGCAGGGTAAAGAGTAATATTAAT
TTCACTGGCAAATAACAAAATGGGAGCAAACATGAGGGATGTTAAGACAA
GACTTGTGTTTTTGAATGCTTCTGGGAATGGAAACTCTCCAAGAATCAAG
GGAAAGGGGAAGAAGGTTGGACATATTTGGAGTGCACTAATACCAATTCT
TTTTTCTTCTGGTATGCATATGTGACTATATGCAACATCATCCTGGGTCA
GGCCAACTGGTCATTTAAACCACCATGCTGTCTGCCTCACCTAGTCGAAC
AGTTCATATAATGATCTTCCACTATTCCTTAATGGACATACAGGTGTTAG
TCTTAATGCACCAACCAATATTGCGATAGGCTGGAACAAAACCTTTTGCT
CTTTGAATGTCCACAGTGAGTAACACTATGCTAGGTATGTAGTAGGTGCT
CAATAAATGTATCTTTCACACACTTCCTAAATGAAGTCTATTTCTTCCTT
CATCGTTTTCCTGAAAGATCTTTCTTGACCACTAAGGATGAACTCCTCAT
CTCCATGTCCAGTGAGTGGTTTAGAAATGTTTTAGTCTTCCTCCTCCTTG
ACTTCATAATGGCATCTGACACTGCTGTGACACTTCAGTTGTCTTCTGTG
ACTCTGAACTTTTCTGGTTCTAATCTTTTCTCCCTGATGGCCTCTCTACC
CTGACCTCCAATGATTTCTTTTCCTGTTTCTGCACTCGAAAGTCCATATT
CCACAAGGACTCTGCTTTTCTGTCTTGTCACTCTTTATGAGAAATTAATT
GTATCTCATTTCAAATCAATGCATGTATCTATCATCCTCTGTCACATTAC
ATGCAAAGTATCTGCTTATGGATCTGTCTGTCCAACTAGACCTCAAGCTC
CTCAAAAACAGATCCCTCACTGTGTTCGTCTCTGTGCCTCCAGTACCTGG
CACAGAGCTGGACACTCAGTGAATGCTCCATACACACGGGCCCAACTGAT
CCATTCTCAAATTATGCTCGGAGTTGGTAGATTGGGCAGAAATTATTACC
CCCATTATATAGAGAGGGGACCCCAAAGCTCAAGGAGGTAAAGCAAACAT
TAGAAACATGATTCCTGTGACTGGCTGTGGAGACTCCGTGTAATAATCAT
TCTGGTATTGCCAATTGCAAAAGGACTGTAAAACTAATAGAGATGCTGTC
TAAATACCGACATCCAATCCTTTCATGCTCTTCTGAGCAGGCTTGAATTT
TCCAGTGCCTCTCTTAAAATACAGCCCGCAGGACTGAGCATAAAACTGCA
TGTGGCCTGACCTGCCAGCACGCGCTGGGAGTATTGCTTCCCTCCTTCCA
CACTCTGCTGTGCTATTAATAGAGCCTCAGATTGCACTAGGGTTCTCAAC
AGCCTCCTCGCGCTGTAGGTTCACATCAAGCTGGTGATCAGCTAACCCCC
CGGGTCTTTCTCATGCAATGCCTTCTGTCAGGCCAGGCCTCCCCAGCAGC
CACTTGGGCAATGAATGTTTTTGAATGCTCATGATTATTTGTGACTTAGA
CTAGAAGGTACAACACCAGATCATGCCCTTCTTTCTCATGTGGCATTTTG
CTGAGTGGGTGATGGGGTCTTAGGGGTCCTGTTCAGGACCCAGAGCTGTG
GCCAGCCACTGGGGGCCACCAGCATCATCGGCCCCACAAAAGTAAGAGGA
TGATGGCGAAATTAATTTTCTGGCTCACTTCAAATTATTCTTATGTTCAT
CCCTACTCCTCTTGGATTAGGTCCTTTCTTGGTCTTGTTCTAATGCTGGG
TGTTTGTATGCACAGCCTCTTTTCCCTCCCACCCATGGACACAGCCACAT
TTTGATTTCTCATGCCCTTTCCAAATAGTAGTAGTATTTTTAGCATGAAT
ATCTTGCTCAGAAATTGGCTGTACAGTCTATCCCCTATTGTCTTCACATC
TAATACTTTTCTTTTTTCCCTCTGCCTCTCCTATGCATCAATACCACGTT
TGGCTAAAGAGATTTGATTTTGACCTATTTGAATTCTCCCTTCACAGATG
ACAGCCCTTTCTCCCTCTCCTTCCTTCCCTTCAATTAGTTTTTTCAGCCA
CTTGGAATTAGCTGATGGGTGATTGTAGAAATTGCAACGTGGGCTACTGT
GGTGGGTCTCAATGTCAACTCCAGGAAACCTCTGAATCTGGGGGGCTCTG
GTTTCAGAATCTGATAGCCAGGCCCTGAACTCTGGAATGTGGGGCTGTGA
CATGAGATACAGCTTCTCTTTGCTCGGCCACTAGAGGGAACTGAAATGTG
GGGCGCAAGAAGGCGTTTCCTCTGTTCGCCAGACGAGGGCGCTCATACCC
ATGGTCCTCCAAAGTTGGAATTTCTCGCCCCAAAACAGATATTGTCGGGT
TGGCCTCCTTGTAACCCAAACATACGATGGGATGACATTACAGCTGTGCT
ACTGATTGCTGCTTTGACCGCCTCCTATGCTGTGTAAATGGCCAAAAGCA
AAGAATTATTAAAAAGCAGGCCCAATGTTGTCCAAGCTCACGTGTGGTTT
GTGGGTCTATGTGTTTGCTGCTGGCAAATTTGCAAGCAGATGGGACTCCA
AGGCAAGGCGTGGAAGTGATGATGGGAACGTTGGAAGTTCACAGACATAA
CTTGTAGAGTGTGTGAGGCCGGGTGCGCGGACCCTGTGTATCTGCAGCTG
CGATACTTAGATTTCAGTTTGGCAAGGCAGGTCACGGTGGAGATGGGGCA
AGCTGCAAGGGTGGTGGAGAGGAGGAAGGGAAGGTGACAGTGGCCCTCTG
TCAACTGTTTCCAGGTGGAGTTGAAAGGTGTAATCATTTTCTTCTGGGGG
CCTTGGCACCTTTCATCAAGACGAAGTTGGTGACTGGTTTAAAAAGATTT
AAAAAATTAAGCTCGAGAGGCCAAAGGAGAAAATGGTTTCCAGGTGGAAA
GGGCTTGACAGAATGGTGCTCTTGTGCCGTGACTCCGAACTCCGTGGAGC
ATTCCAGTGGCCCACTGTACTCCCACCCCTCCAGGCAGCACTGGGAGGCA
GCCAAGTCTAGGAGGCAAAGGGCTCCCTAACTGCCAAGCAGTGAAGATGT
TGAATAAAATATTTACTTACACGTTTAAGAATAATGATGACAGCATGACA
AACAGTGGTGAAACAGCTTTAGGGGACATGGAAGGGCAGCCCTGGGATAT
TTTTAATGAGAACAGTGACTTCCTGTTTAATTCCCGAGGCTTGTCTCTTT
TGCCTACCATACCCACACTGGTATCACAAGATACCGCCCATGATTGGGGA
GGGGGTTCACCAGACTGGCCTAGGGAGTCCCCTGCAGGAAGCTGCCACAT
GGAGAGGCTACAGCCAGCCTCACTCCCAACCCTAAGCTATTGCCCACCTT
TTGCAACTCCTGAAGATTACAGCTTTCTGATCCCTTCCCCCCCCCTACAC
CAGAAGGGTCCTCTGTTGTGGTCATTCAATAAATGATATTTCTTAATTAG
GAATCTAGCTCTTTCTTATTCAGCTGGACTAATAAGCACCCTATGCCCTG
CTTGGGTGTGATAATTTTGAGTTGGAGACAAGGAAAAAGGAGTGAATGAA
AGGGAGTAAAAGTCTTCACCCACAGCACTAGATTTCAGCTATGCCCAACG
TGAAAATGGAAAGGGAAAATGGAAAAAAAAAAAATTGGCCAAACACGCTT
TAGGTTTGTTTTTCCCTCCTTTTGGGAGCTTTTTGCATTTTCCTCCCCAA
TTTGGAAAAAAAATGAAAGAAAACAAATTTCTCTATCATTTAAATAAAAC
AGACCTTTATGTCTCTAAATATAATACATCAAACAATGTTAGGAGTAACT
AAATTATACATAAAGATACTTGTTTGTTAGATTGTTAAAGGCTGTTTGAA
AAATAGAATTTCGCTGGTGAGGTGCCTCACACCTGTAACTCCAGCACTTT
GGGAGGCTGAGGCAGGTGGGTCACCTGAGGTCAGGAGTTTGAGACCAGCC
TGACCAATATGGTGAAACCCCATCTTTACTAAAAATACAAACATTAGGTG
GGCTGTGATGGCACATGCCTATAATCTCAGCTACTCAGGAGGCTGAGACA
GGAGAATTGCTTGAACCGGGGATGTGGAGGTTGCAGTGAGCTGAGATTGA
GCCACTGCACTGCAGCCTGGGCGACAGAGGGAGACCCTGTCTCAAAAACA
ACAACAAAAAATAAGAATATAATTTCACTTTTTGTCAGCCTCACATCCTC
CATGGTTTTGTGTGTTTATTTTTCCAGATATTTTATACCTCCAGTTATGA
CTCTGTAGAAAGATACCATCTGGGGGCCAGGCATGATGGCTCACCCCTGT
AGTCTCAGCACTTTGGGAGGCTGAGGCAGGTGGATTGCCTGAGGTCAGCA
GTTCAAAACCAGCCTGGCCAACATGGCGAAACCCTGTGTCTACTAAAAAT
ACAAAAATTAACTGGGCATGGTGGCAGGCGCCTGTAATCTCAGTCACTCG
AGAGGCTGAGGCAGGAAAATTGCTTGAACCCAGGAGGCAGAGGTTACAGT
GAGCCGAGATCGCGCCATTGCACTCCAGCTGGGAGACAGAGTGAGACTCT
GTCTCAAAAAAATAAATAAAGATACCATCTTGGCTTTCCCATATTATACA
GATCCAGAAGAAAGACCAACTTAGGATCTCTATGCACATGATTATTTCAT
ATTTTTTGGAAGAAAATAAACTAGTGTTGAATTTAAGAACATGCTCAGAA
GTCATGATTTTTGAGGAAGGAGGCTATTTATTTAAATCGATATAAAGGAC
CATTAGTTTTAGACCTGTAATTTATACTTGGTGAAATTTTCATGGAAAAA
AAACAACAACAAAAAAACTCATTTCCCTAAATATTTTCTAGTAAAAACAT
GGCTTGCTTTTTTGGTGCAAAGTCTGCCACGCTGTTTTTAAAAGCGAGGC
TTACGAGACCGTGGGAGAGAGATAAGTGAACAGCCTCTTTAATAAGAGAG
GCGTCCAGCGTGGCGGCGGAATGCAATACCAAAAAGTAAACAAAGAGCAT
CGTGTGAAAAAGAGCAAGTTGAAATGAATCTTGCTTTTCCTATTTGAAAA
ACACGCTCATGGTTGTTAGCAACTGAGTCAAGACATTTAAATCATATATA
TACTTTTAGATCTTGACAGTGACCTTTTATAAGTGTACAGTGGGGATAAG
AAGATGAGCAAAGCCTTGCTGCAGAAAAAGCATTTCAGTTAATTGAACAT
GAAATGTGTTACCATCTGATAACATTAATAATATGTGATCGCTACTTTGT
ATCTAATATGCAGTTCATTTGGTTGGAATCTAAAGCATTCTATAAATGTT
AGAGTATGAATCCTGTTGCAAACCTATAAACTAAGCAGCTCTATTTTGGT
GCATTTTGAAGTATCTCTGTGTTAGTTATCTATGCTGTGTAACAAATTAT
CCCAAAACTTAGCAGCTTCGAACAACAAATATTTATTATCTCAGCATCAA
TCAGGAATGGCTAAGCTGGGAGGTTCTAGTTCAAAGGCTCTCATTAAGTT
GTAGTCAAGGCATTGGCCAGATTAACAATCATTTGAAGACCTGATGAGGG
CCGGCAGATCCACTCATAAGGTGTCTAACTCACAATCCCAGCAAGTTAGT
TTGAGATGTTGACAGTAAACCTCAATTCTTTTCTACACTGGTCTCTCCGT
AGGGCATGGAGAGATGCCTGAGCATCCTCATGACATGGCAGCTGGCTTCC
CCCAGAGCCAATGATCCATGAGACAAAGCAAAACGGAAGCTACAATATCT
TTGGATGATCTAGCCTTAGAATTCACCCATCATCACTTCCTTCAGGTCCT
GCTCCTTAGAAGCCGGTTACTAAGCACAGTCCACACTCGAGGAGAGGGCA
ATTCGACTCCATCTTTTGAAGGAGTCTTAAAGAATTTGTGAGCATATTTT
AAAGGCACCGCAATCCCCTATTTACATAAGGACAGTTGAAAATGATGGTG
GCTTACCTGCTCAAGGTCAACGAACTACTGGTAAGACCCCACCTGGAAGG
CGGCAGGCTTTTTTATTTATTGTAAAGCAAAACAGAAAACCCACATTCTT
GAAATAACTGCACATGAATCCCAAATCTGTCTCTTTCAAATGTCCAAGAC
CTTCTAAAAGTGGCAGGATGCTTTCTGTTTAGAAATGGATGAGATGGACA
CTAGACTGGAAGGGTCAGCCTTTGATTAAGAGTCAGCTTTCCTCTTAATC
AGCTCTGGGACCATGAGAACAAAAACACTTTTCTAAGGGATGTTTTCCTC
CTTTGCAAAATATGATGGGCTAGCCGAATGGTTTCCAAAGTTGGTGGCCT
TTAAGTCCTCTGGGGACTTAAAAACTCACTGATCTTGTGTTAAATCCACA
ATGTCCAGGAATCTGTACCACTTAAAAGCACTTGGGGACTCTGGCGGCCT
GTTTTGCAGACAGTAGGAACTGCTCGGCTACATGATTTCTCACTCTTCCA
CTTTTAACATTATTTTATTTATTTTTGAGACAGAGTCTCTCTTTGTCACC
CAGGCTGGAGTGCAGTGGCATGATTTTGGCAACCTCCGCCTCCTGAGTTC
AAGCGATTCTCCTGCCTCAGCCTCCAAAGTAGCTGGGATTACAGGCTCCC
GCCACCATGACTGGCTTTTTTTTTTGTATTTTAGTGGAGATGGGGGTTTT
ACCATGTTGGCCAGGTTGGTCTGGAACTCCTGACCTCATGTGATCTGCTC
ACCTCTGCCTCCCAAAGTGCTGGGATTACAGGCGTGAACCACCATGCCTG
GCCAACATTATTTTAACTCTCCCCATCAGACTGGGTATGCCCATGTAAAT
TGTTGGTTCTCCATCTTCACTACAATCATGAGCAGAATTTTTAAAAAATA
TGATACCTAGGGCCCTCCCTAGGCAAAATATAAGTCATTCTGGGGTGGAA
CTCTGGTACCATCACGGGTTGTTGGCTTGTTTTCATCAGTACATTTAAAA
CTAATCATGTTTAGCCTTGTTGGCACATTAGAATCACTTGGGGAGCTTTA
AAAAAGCCCACTGCCCAGCCTGTCCCCCAGGCCAATTAAATCACAATCTC
GTGGGAAAACCAAGAATCAGCATTTTTTAAAGTTCCCCAAGTGATTACAA
CATACAGCCAAACTGACCTATGTTTGCCACATTTGAGATAATTCTAATGC
TAATTCACCTATAAGGGATTATTCAGAAAAAAATCCCAACATTTAGATGC
CACAGTACTCTAAGAAAAAAAATGCATTTAAAGTGGAAGATATTACAATT
TTGAAATGAAAGATATTAAAAATTAAATGGAACTAAGTTCCATTTCTGGC
AATATGGTAGACTAAGTAACTTGAAAATCCTCCCATCATAAACCACCTAT
AAATACTGGTCAGAATGTAATAAACACCCATTTAAATGAGCTCTCAGGAC
AGTAAGCAAAGGCTCTCAGAGTCAGGAAGAAGAGGGAGATTCTAGCATGG
TATGCAAGTAAGCTGAGGTTGAGCTGGTCTTAGGCAGGTTTGCTGGTGTT
GGGAACCTGAGGTTTGAGCATCAAAATAGGAAGGAGACTATGCTTAAGGT
CCATTAAAAGTGGGAAAATGGAATTCAGAATTCCCATAAAGCTGGAATCC
CATCAAGCTAGAACCTCCTGAATCACTAGAGAAATAATCACTGGAAAAAT
AATCTCCCCAATGTCACAAGGAAACAAGAAAATGTGCCTGTCTTTGCAGG
GGTTGAGGGTGGGGAATAAAGGGCTTTACTGAGAATTTGAGATTATAATG
TGGTATGGTCCAGGAACCCCAAAGCTGAGAATGAATACAGAAATACAGAC
CCAATGCCAAACTATACAATGTATGTGGATATAATCCTCCACAAGCAAGA
TGTAGCAGACACAAAGGTCCCAAGAACCTCAGGTAACAGAACTATCAGGC
AGACTATAAAATAAGCAAATTGAAAATTATTAAAGACACAAAGAGGCCGG
GCGCGGTGGCTCACGCTTGTAATCCCAGCACTTTGGGAGGCCGAGGCGGG
CGGATCACGAGGTCAGGAGATCGAGACCATCCTGGCTAACACGGTGAAAC
CCCATCTCTACTAAAAATACAAAAAAATTAGCCGGGCGTGATGGCGGGCG
CCTGTAGTCCCAGCTACTCGGGAGGCTGAGGCAGGAGAATGGCGTGAACC
CGGGAGGCGGAGCTTGCAGTGAGCCGAGATTGCGCCGCTGCACTCCCGCC
TGGGCCACAGAGCGAGACTCCGTCTCAATTAAAAAAAAAAAAAAAAGACA
CAAAGGAACCTTTGACACCATGAGAAAATAACATAACACTCTAAAAAAGG
TAGATTTTAAATAGAACTAAATAGAATTTCTAGAAATGACAAATATAGTC
ACCAAAATGAAAAGCTCAGTGATGAGTTAAACAGCAGATTAGACAGAGTC
GAAGAAAGAACCACAGATGGATCTGAGAAAATTGCCCAGGAAGCAGCAAA
GACAAAGTGAAGGAAAGTCTGACAGATTCAGAGTGTGCTGGATAGAAGGA
GAAGATGCATTATACATTTCATATAAGTACCAAAAGACAATGAGAGGGAT
ACTTCATTTAGAGAATCCCAAGATTATGCATATACAATGAGTATTGAATC
AGATAAAGAAGAAGAAATTCATACTTGAATATAGCAGAGTAAAAATGTAG
GAAGCCAAAGACAAGGAAAAAGTCTTAAAACCAGAGAGAAAAGACAGATT
ACCTACAAAGGAATGACAATTAGACTCATAGCAAATGTTTCAGAAATAAA
GAATAGGAAGACATGGTATATTCAAAAAAGTGCTGGGGTAAAATAACTGC
CAATCTTGAGTATTACACCCAGAGAAATCATCATTCAGGAATGAGAGTGA
AATATGACATGTTTGTCTTAGCGGAGAGAGCGTACCACTCAACAATCCCC
TGAAAAAAACTAAAGGTATGTTTCAGGGGAAAGGGTCTATATCTAGAAGG
AAATTGGTAAATAAGGGCAAATCTAAACGATGAATTGACTGTATATAAAA
TTACAATAGAGATTAAAATTAGGGGTATAAAAAGTAGGTGGATCTAAAAA
TAAGCAACAGTAAAACATAATGAGAGGATGTAACTGAAGTTGAATCATTC
TTAGCTTATTGGATAGTTCTAGGGCATTTGATTTACTTTAGATCACATGT
ACAGGTTAAAATTGTAATCACCGAAAGAGTAGAAATAGAATTTACAACTT
CCGGCCAGACACAGTGGCTCACGCCTGTAATCCTAGCACTTTGGGAGGCC
AAGGCAGGCAGATCAATTGAGGTCAGGAGTTCAAGACCAGCTGGCCAACA
TGGTGAAACCCCGTCTCTACTAAAAATACAAAAATTAGCTGGGTGTGGTG
GTGGGTGCCTGTAATACCAGCTACTCGGAGGCCGAGTCAGGAGAATCGCT
TGAACCCAAGAGGCAGAGGTTGTAGTGAGCTGATTGTACCACTGCACTCC
AGCATGGCTGACAGAGTGAGACTCTGTCTCAAAAAAAAAAAAAAGGCCTC
GGCCTCCCAAAGTGCTGGGATTACAGGTGTGAGCCACCATGCCCGGCCAA
TAGCATCTCTTATACATTGCTAGTAGGAGTACAAATTGGAACACCACTTT
GGAAAACAGCTTAGTATTACCTTGTAAAATTTTACATTCACGTATGTTAC
GACCCAGCAATTACTCCAAAGAGAAATTCTGATCTATGTGCATCAGAAGG
TAAAAATGTTCATAATAACACTGTTTATAATAGCCAAAAAAAAAAAAAAA
TTCCTGAAAGCAACCCAAAGGCTTGTTTGTGAGAATAGAGAAACTAAACT
GTGGCACAGTCACATAATGGAATATTATACAACTGGGAGAAAGAATGAAC
TACAACCTGATACAAAAATCTAATTTTGTTCCCCCCACCCCCCCAGGGCC
CTGGCTAGAGGATCTAATTGATTCTTAATAATTTCATATTGAGTAAATTA
TCAAGCCTCAGAAATTTTTCATAAAGTTTCAAAACAAAAAGTAAAACAAA
ACAAATATTAGTCATTGATATGCATGATAAAACTTTTTAAAAAGCGAAAA
ATCATAACAAATACAAGATTCAGACTGGTGGTTACTTTAGAGGAACAAAA
TAGGGAGGAACACATAAGCAGATGTTACATAAGTCAAGTCATTGTTTCTG
TTTTAGTTCTCTGGTTGAATAGCAGGTTTACAGGTATTCATGATATCAGC
AAATAAAATAAAATAGGGCCATGAGTATACACAATGATGATAGTGTGTTA
TACTAGAGATTGTGACTAATATATTTTTGTGCCCCTAAATTGTGATATTT
TGTGATCTTTAAAAATATCAGCAATCACAATAAATGTAAATGGACTAAAC
TTACTAGTTAGCACAATAATGAACCAGAGCTAACTATATGCTATTTACAG
GAGACTGAACAAAAAATTTGGGACATGGAAAGGTTCAAAGTAAAAGGAAA
GAGGGAAAGAGAAAGATCTATAAGTGAAGGGCTAATTAAAAGAGTAGTTA
CATTTATTACAGACAAAGTAGACTTTAAAGCAAAAGGCATTAGGGATAAG
TATCTTCTGTGCCAATATTAAAGGAATAATTCCTAGGAAAATAGCAAATC
TAAGCTCGTATGCACTGAATAACAAGGCCTTAAAATACACAAAGCAAAAA
GTATGAGAAGCAGAAAATGTATAGTTACAGTGGGAAATTTTAACAGTTCT
TTTTGATGCACCTGACAACATACTTTTAAAATACAGCAAAATTTGAGAGA
ATTACAGGAGAAACTGGCAAATCTAGTCATATAGAAATTTTAATGTACTT
CTATAAAAACCAACAGGTCAAGCTGACAAAATATTAGTAAGGCTACAGGA
AATCTAGACAATATAATTAATAAGTCTGATCTAATAGACCCATATAAAAT
GCTGTACTTAAAAATTAAGGCATATACATTCTTTTCAAATCTACATGAAA
TATTTATAAAAATTGACTGCACCAAAGCAAGTTTCAATAAATAACAAAGA
ATCTGCTTCATATAGATCACATTCTTTGACCTTAATTCAGTTAAGTTAGA
CGTTAGTAACTAAAGAATAACCTCAAATACCCCTCAAATACACCTGTATT
AATTCACTAGTCAAACAAGAAATCGTATCTGAAATCTAATTTTTTTTTTT
TTTTAAACAGGATCTCGCTCTGTCACCCAGGCTGGAGTAGTGACATGATC
ATGGCTCGCTACAGTCTCAACTTCCCAGGCTCAAGTGATCCTCCCACCTC
AGTCTCCTGAGTAGCTGGGCCTATAGGTGCATGTTAGCACACCTGGCTAG
TTTCTAGAAAAGTTTTCTTTTGCAGAGATGGGGCCTCACTATGTTGCCCA
GGCTGGTCTCAAACTCCTGGGCTCAAGTGATCCTCCCACCTTGGCCTCCC
AAAGTGCTGGGATTACAGGCATAAGCCATTGTGTCCAGCCTAAAATCTAA
ACTTTTTTTACCTCATTGGTGATAAAAAGTCTATATATCTTGTGGAATAT
AGCTTGAGTGGTACTTAAAGTGAAATCTGTAGTCTTAAATGTTAAAATCA
GAAAACAGATGGCTAAAAATTAATTACCTAAGGCAACAATTCAAAAAAAA
AAAAAAAGAGCAACAGAATAAATCCAAAAAGAGCAGAAGCAGAAGGGAAT
ACTATATGATATATATTAATATTACATTACATATTATATTCTCACAAACT
ATATAATAGTATATATTTTCTATTGTGCCATATATAACAATATAATATAT
AATAATATATAAGAACAAAACTTACTGGAACAGAAAAAGAAACAATATTG
AAACTAAAGTCTGGTTCTTTGGAAACACTAATAGAAAGTAGAAAGAAAAC
ATTAGTAAAAAAAAAAGATCTCTGGCACAGCTGATCCAGATAAGAAAAAA
TACATATAAAATGATATTTAGAATGAAAAAAAAACATTATGGATAGATAG
AGCAGAGATTAAAATACATTAAGAGATAACTATGAACAGCATTTTGTCAA
CACATTTGAAAACCTAGATGGTATGGATAATTTCCTTGAAAAACATAGTG
TATAAAAATAGATTCAAGAAGAAAACAGAAAACCTGAAGAGATCTACGAG
CATTAAAGAAATGGAATCAGTAGTTAAAAATCAACCCACGAAATGTCTAT
CCCAGACCCAGACAATTTACCTGCAAAACTACCAAACATTCAAGGAACAC
ATAATTCCAATCTTACACACACTGTTCCAGAAAATGAAAAAAGAAGGAAC
ATTTACCGGTTCATTTTATGAGACCAGTATAACCAGACAAAGGCAGTAAG
AAAAGGAAAAACTGCAGCCAATTTGACTTATGAACATGAATACAAAAAGA
ATCCTAGAATGAAATTAAATGTTGGCCATCATTCATTCATTCATCCACTC
ACTCATTCAGTCAATCATTATTTATTGAGCGTCAACCGTGCGCCAGCAGG
CACTGTGCTAGTACATGGAGAGCAGAAAGGCACGGGAGCTTCTGGCTTAG
AGGAGATGGGCAATAAAGCAAATGATCATACAGGGTAAGGTACACAGAGG
ACGTTCTGGTAAGGTAACTGCATATCAAAGGGCATTCGACCCTGTCAGAG
AGGTCTGGGAAAGATTTCCAGGCATGTAAGTGGAGTAAGGGTGTATGTGG
GAAGACTGTTTTGTAAGCTGTTGCAGGGCCTCAGGTGGGAGATCTGGGAT
GCAGCAGCAAGAAAGATGGATTTGAACTTGGGCTTCCTTTAGAAAGGCTA
AGTGGAGATGTTGAATAGGAAATTGACCAGAGCCTGGAGCTCTTCAGGAA
GGGTGGGGCTGGAGATTTCAATTTGAGTGGCATCACCATGTGTTTAAACC
CATCCTGGAAGATTGAGTTTGAAGAAGGAAGTGTCCAACATTGTCTTGGG
CTGTTGAGACTTTCAGAGGGTTGAGGACTGATATTGTGCTGCTTGAATTC
TCCTGATGCAGGGGCTACATTGAGTGAGCTGGAGAAAAAAAATGCATAAA
ATAATAATAATAATAATAATAATAATAATAATAAGCTATTACAAATAATG
TAGAGCAAAGGGGCAGCAAGAGGGAATTTTTTTGGACAATGAAACTGTTC
TGCATCTTGATTATGGTGGTGGTTACATGACTCTATACATATGTCAAAAC
TCATAGGATTACAGACCAAAAAGAGTAAATATTACCGTATATAAATTAAA
AATAAATGAGTAAAAACAATGTAGTAATGGAGACTTAAAATCCAGTTCTT
TCTAAGCCCTGACTTTGTAACCGCAGCTCTAGCCCCTCTCTGGATTTTAA
ATCAGTTCTATAAGTGTCAGCTTGTGGAGGTCTATACCAGACAGGAAGGG
CCCCCAACTCTCGCCTTGTGAGGGACAGAATAAACACGCAGGCAGCAGAG
GCCACACGGCATTGGACTGATGGTCAGAGGGTGGGGGTGGGGTGTAGCCT
GGTGAGTTTGGCACCTCTGAGACGCTGATGTATAATGAGGGGATTAGATT
AGGAAAGGCCTTTCTACCTAGGATGGCCTGTGGTTCTACTGTAAAAATCC
CAAACACAATACAATTAGCTCTGTTGTCTGCATTTTGTTTAGAATAATCA
ATCATAATAAACAATCATTGTAACAACTGGCTGTTCAACACATGAGACCC
CAGATGATTTGGGAAGGAGCTTGGAGTGACAGGAAATGTTTGGGTTTGTG
GTTTAAAGCCTTAGAGCACCTTCTCAATATGATTATATTGAGTAGTGATT
GATAATAAACACGACTCAGGTTTACAGTGAAAAAGGAACTTTTACAACAT
TGGTTCACTTCAGCCTCTCACCTTCACCACATCAATCCTGTCAAGGAGGA
ATTACTGCAATTTAGGGAACAGGGAGACTGAGGGTCTGGTCACTCAAGGC
TATGGCTGGTGTTGAGATTTTCCCAATATTCCATTTTTCCAAAGCCCACA
GTGGATTTGGTTCAGTTTTGGTGTTGAGTGTATTCCTTTGTCTCCTAATC
CTATGAAAATTAATGGAAAAGTGTTAATTGGGCATCAATTCATGCTTAAC
ATTAATCTCAGTATTTGATGAACCACAACTTTATGTTGCCCCTCATGCCA
TATTAACTCAGTTTATTGCAACAATTTAAAACGATACAGATTTAAAACAA
TATGGGTAATTGTATCCGTATTGTTTCAAATGCCCCATAAATTGAAACCA
GCCCGAATTTGGGCAGTCTGGAATCTGCCGGAGAAACTTTCATGCGATGC
CTTTGGAAGGCTACAGACATTGTCTTTTTGGAGTTTTCAGTGCATGAAGG
TATGAAACCGCATTTATTAAGCACCTACTGTATGCCAGAACCCGTGCTGC
ACAATACTACTGCTGCTAAGGTGGGAGTGATTCTGAAGCCTTCTGCCACC
CTAGCTACCTCTGCAGGTCGTGAGGGGTCTTGGGCTATTTCAGTATCATG
CACTTTACTATCCTGGCATACAAAGGCTGGGTGAGAAATAAAATATATAA
CGAACGGATTACACAGGGGTTTCCTGAAATAACCACCCTTCCCATCCATC
CCAGAGACACCCCAAAAGTACTTCTCGTTATATACAAACATTTGCTTTGA
ACCTCAATCATGTGACCTTGACTCCTATAACCTATCTTATTACATTTTTA
AAACACTGTATGATTAACGCGGAAACCCTTTCTTCGGCACTTTCTCGCCA
CTGGAATCGCGTCAGTTTCTCAAAGTTCCAAAATAACCTTTCCCGGGCAC
GGATTGGTACCTCTACTGGGGAAGGGCGGGGAACCGCGCAAGACGTGCCG
GTGTGGAGCCAGAGCCAGAGAGAACTTCCAGCGCAAAAGGAAAATAAAAC
TTGTGGCTGGTGTTTGTGCAGGAGGGTCTCCGCCATCCTGAAGCCCCCCG
ATCCTGGGGCGTCTCGGGGGCCGCCAAAGGAGCGCCAGGGTGTGGGTTTG
CTCCCGACGTCCTTGACCTAAATTTCTGAGCGGTGGCTGGAAACAGGGCA
CAGCGGAGGGCGGGCGGCTGGTGCCATTCCCGGATCTCGGCGGCAGGGGC
CGGCAAACTTGAATGGAGAGGGCGAACTAGAGAGGGTGGGGGGCGTCTTC
TCCCAGGTCCGGGTGAGGAGCCGCAGCAAGCTCCCCGCGCCTCCCCTCCC
CCGATCCACCCGCCCCCCGCAGCCCATGTGATCCAGGGAAGTCGGGGTGC
GCTCCCCCTCGCCCTGCGCCCTGCCGGCCCGGAGGCGGGGTCCCCTCCGC
CCGCGGGGTTCGCGCGCCACCCTTGTGGGTCCGGCCGTGGGGGGCCGAGT
GTGCGCGCGCGGGCAGGCGGGGGCCGCACGGGGGTGCGTGACGTCACCGG
CATTGGTTACACGACGTTCTAGAACTCCGCCCCACGTGCGCCGGGGAGGA
GGGGGAGGAGGAGGAGGAGATGGGGGTGGGGAGGAGGAGGGGGAGAGGTG
GGGATGGGCCGGGGGGGCGGGGACGGGGGGGTGTGCGAGGCAGCGGGGCT
GAGCTAAGCCGAGCCCACGTGTGACGGCTCTCGCCGCTGCCCCGGCTCCG
CCGCTCGCAGAGAGATTCGGAGGAGCCCGGGCGGGGGGGAGGAGGAGGGG
GAGGAGGGAGCGGAGATCTCGGGGCTCGGAGCCGGCCGCCGCTCCGCTCC
GATCGCTGTGGGGCTTGGTTTTTTGGGGGTGGGGGGGCGGGGGGGCTCAG
ATATG

[0477] JAK2

[0478] The JAK2 gene is located on Chromosome 9. JAK2 protein promotes the growth and division (proliferation) of cells and is part of the JAK/STAT signaling pathway important in transmitting signals from the cell surface to the nuclei. JAK2 is especially important for controlling the production of blood cells from hematopoietic stem cells. These stem cells are located within the bone marrow and have the potential to develop into red blood cells, white blood cells, and platelets. Essential thrombocythemia is characterized by an increased number of platelets, with the most common mutation being V617F found in approximately half of the affected people, with a small proportion having a mutation in exon 12. The V617F JAK2 gene mutation results constitutively activated JAK2 leading to the overproduction of megakaryocytes, and hence excess platelets. As a result, there is increased risk of blood clots and decreased availability of oxygen. Overproduction is also associated with primary myelofibrosis, as megakaryocytes stimulate other cells to secrete collagen thereby replacing bone marrow by scar tissue. The V617F mutation is found in approximately half of individuals with primary myelofibrosis. A small number of people with this condition have mutations in the exon 12 region of the gene. These JAK2 gene mutations result in a constitutively active JAK2 protein, which leads to the overproduction of abnormal megakaryocytes. These megakaryocytes stimulate other cells to release collagen, a protein that normally provides structural support for the cells in the bone marrow but causes scar tissue formation in primary myelofibrosis. The V617F mutation is occasionally associated with leukemia, other bone marrow disorders and Budd-Chiari syndrome.

[0479] Protein: JAK2 Gene: JAK2 (Homo sapiens, chromosome 9, 4985245-5129948 [NCBI Reference Sequence: NC_{—}000009.12]; start site location: 57256743; strand: positive)

Gene Identification

| | |
|---|---|
| GeneID | 3717 |
| HGNC | 6192 |
| HPRD | 00993 |
| MIM | 147796 |

Targeted Sequences

| | | | Relative |
|---|---|---|---|
| | | | upstream |
| | | | location to |
| Sequence | Design | | gene start |
| ID | ID | Sequence (5′-3′) | site |
| 12063 | | CGCACCAGTTTGTCCACGTCCAG | 1663 |
| | | TG | |
| 12098 | | GCCGTCACTGCCGACATAAGCACA | 1811 |
| | | GAC | |

Target Shift Sequences

| | | Relative |
|---|---|---|
| | | upstream |
| | | location |
| | | to gene |
| Sequence ID | Sequence (5′-3′) | start site |
| 12063 | CGCACCAGTTTGTCCACGTCCAGTG | 1663 |
| 12064 | GCACCAGTTTGTCCACGTCC | 1664 |
| 12065 | CACCAGTTTGTCCACGTCCA | 1665 |
| 12066 | ACCAGTTTGTCCACGTCCAG | 1666 |
| 12067 | CCAGTTTGTCCACGTCCAGT | 1667 |
| 12068 | CAGTTTGTCCACGTCCAGTG | 1668 |
| 12069 | AGTTTGTCCACGTCCAGTGT | 1669 |
| 12070 | GTTTGTCCACGTCCAGTGTC | 1670 |
| 12071 | TTTGTCCACGTCCAGTGTCA | 1671 |
| 12072 | TTGTCCACGTCCAGTGTCAA | 1672 |
| 12073 | TGTCCACGTCCAGTGTCAAC | 1673 |
| 12074 | GTCCACGTCCAGTGTCAACT | 1674 |
| 12075 | TCCACGTCCAGTGTCAACTG | 1675 |
| 12076 | CCACGTCCAGTGTCAACTGA | 1676 |
| 12077 | CACGTCCAGTGTCAACTGAG | 1677 |
| 12078 | ACGTCCAGTGTCAACTGAGC | 1678 |
| 12079 | CGTCCAGTGTCAACTGAGCA | 1679 |
| 12080 | TCGCACCAGTTTGTCCACGT | 1662 |
| 12081 | ATCGCACCAGTTTGTCCACG | 1661 |
| 12082 | GATCGCACCAGTTTGTCCAC | 1660 |
| 12083 | GGATCGCACCAGTTTGTCCA | 1659 |
| 12084 | GGGATCGCACCAGTTTGTCC | 1658 |
| 12085 | TGGGATCGCACCAGTTTGTC | 1657 |
| 12086 | TTGGGATCGCACCAGTTTGT | 1656 |
| 12087 | CTTGGGATCGCACCAGTTTG | 1655 |
| 12088 | CCTTGGGATCGCACCAGTTT | 1654 |
| 12089 | GCCTTGGGATCGCACCAGTT | 1653 |
| 12090 | GGCCTTGGGATCGCACCAGT | 1652 |
| 12091 | GGGCCTTGGGATCGCACCAG | 1651 |
| 12092 | GGGGCCTTGGGATCGCACCA | 1650 |
| 12093 | GGGGGCCTTGGGATCGCACC | 1649 |
| 12094 | TGGGGGCCTTGGGATCGCAC | 1648 |
| 12095 | CTGGGGGCCTTGGGATCGCA | 1647 |
| 12096 | TCTGGGGGCCTTGGGATCGC | 1646 |
| 12097 | ATCTGGGGGCCTTGGGATCG | 1645 |
| 12098 | GCCGTCACTGCCGACATAAGCACAGAC | 1811 |
| 12099 | CCGTCACTGCCGACATAAGC | 1812 |
| 12100 | CGTCACTGCCGACATAAGCA | 1813 |
| 12101 | GTCACTGCCGACATAAGCAC | 1814 |
| 12102 | TCACTGCCGACATAAGCACA | 1815 |
| 12103 | CACTGCCGACATAAGCACAG | 1816 |
| 12104 | ACTGCCGACATAAGCACAGA | 1817 |
| 12105 | CTGCCGACATAAGCACAGAC | 1818 |
| 12106 | TGCCGACATAAGCACAGACA | 1819 |
| 12107 | GCCGACATAAGCACAGACAA | 1820 |
| 12108 | CCGACATAAGCACAGACAAC | 1821 |
| 12109 | CGACATAAGCACAGACAACT | 1822 |
| 12110 | CGCCGTCACTGCCGACATAA | 1810 |
| 12111 | TCGCCGTCACTGCCGACATA | 1809 |
| 12112 | ATCGCCGTCACTGCCGACAT | 1808 |
| 12113 | AATCGCCGTCACTGCCGACA | 1807 |
| 12114 | CAATCGCCGTCACTGCCGAC | 1806 |
| 12115 | CCAATCGCCGTCACTGCCGA | 1805 |
| 12116 | GCCAATCGCCGTCACTGCCG | 1804 |
| 12117 | AGCCAATCGCCGTCACTGCC | 1803 |
| 12118 | CAGCCAATCGCCGTCACTGC | 1802 |
| 12119 | CCAGCCAATCGCCGTCACTG | 1801 |
| 12120 | CCCAGCCAATCGCCGTCACT | 1800 |
| 12121 | ACCCAGCCAATCGCCGTCAC | 1799 |
| 12122 | TACCCAGCCAATCGCCGTCA | 1798 |
| 12123 | CTACCCAGCCAATCGCCGTC | 1797 |
| 12124 | CCTACCCAGCCAATCGCCGT | 1796 |
| 12125 | GCCTACCCAGCCAATCGCCG | 1795 |
| 12126 | TGCCTACCCAGCCAATCGCC | 1794 |
| 12127 | TTGCCTACCCAGCCAATCGC | 1793 |
| 12128 | CTTGCCTACCCAGCCAATCG | 1792 |

Hot Zones (Relative upstream location to gene start site)
1550-1900

### Examples

Genetic Code (5′ Upstream Region)

(SEQ ID NO: 13675)

GTCATTTATTTCTGCTGTGAACTTCATTTTTTCCTTCCTTCTGTTAGCTT
TGGGCTTTGTTCTTCTTTTTCTAGTTCCTTGAGGTGTAATGTAATGTTGT
TTGACATCTTTCTTCCTTTTTGATGTAGGTATTTATTGCTATAAACTTCC
CTCTTATAACTGCTTTTGCTGCATTTAATACTGACTATAATAAGATACGA
TGTAATAGATTTCAAGGAATTATGTATTTTTGAATAAATTAATTCTTTAA
AGTTGCATATCCAGTTGCAGATGAACTTCAAAAATCTTGCAGTTTTATAT
CTGTTACAGTAATTGCCAGGTTTTGTTGTTGTTGTTTTGATACATTAGAA
GTTCTAGAATTGTTATATCCTCTTGATGAATTAATCCCTTTATCATTCTA
GAATTACCTTGTCTCTTTACTGTTTGTGACTTAAAGTCTGTTGTATCTGA
TATACCTTTGCATGGAATATCTTTTTCTATCCCTTTACTTTCAGTCTATG
TGTATCTTTAAAGGTGAGATGAGGTTTTGTAAGTGGCATGTAGTTGGGTC
ATGTTTTTTAGTCCATTTAGCCATTCTCTATCTTTTAAGTGGAAAGTTTA
ATCTATTTACATTCAAGTTTATTCTTGATATGTGAAGGCTTATTCCTGTC
ATTTTATTAATTGATTTCTGGTTGTTCTGTAGGTCCTTTGTTCTTTTCTT
TCTCTCATATTGTTTAGCATTGTGGTTTGTTGGTTTTCTATAGTGATAAC
ATTTGAATCCTTTCTTGTCTGTGTGTGTTTGCTTTACCAGTGGGTTTGAT
ACTTTCGTCATCTGTTTTTCATAATGGTAGTAATTGTCCTTTTTGTTTGT
TTGTTTGTTTCTTTTTTGAGACAGGGTTTTGCTCTTGTTCTGTCCTCCAG
GCTGGAGTGCAGTGGTGTGATCATGGCTCACTGCAGCCTCGACCTCCATG
GTCTCAGGTGATCCTTCTGCCTCAGCCTCTCAGGTAGCTGGGACTACAGA
AACCTGCCACCATGCCTGGCTAATTCTTTTGTATTTTTCGTAGACATGGG
GTTTTGCCATGTTGTCCAGGCTGCTCTTGAACTCCTGGGCTCAAGCAGTC
TGCCTGCCTCAGCCACCCAAAGTGCTAGGATTACAGGCTTGAGCCACTGT
GCCTGGCCTGACATTGTTCTTTGACTTCCATATGTAGAACTCCCTCAAGC
ATTTCTTGTAGGTCTGGTCTAGTAGTGTTGAATTCCTCAGCTTTTGCTTG
CCTCAGAAAAACTATTTTTCCTTTGCTTAATGAAGGATAATTTTGCTGGG
TATAGTATCCTTGACTTGCAGGTTTTTTTCTTTCAGCACTTTTCATATAT
CGTTCCATTCTCTTCCTGGCCTGTAATGATTCTGCTGAGAAATCTGCTGT
TAGTCTGATGGAGCTTCCCTTAGAAGTGACTAGACTCTTTTTTCTTGCTG
TTTTTAGAATTCTCTCTTTGTCTTTGACAAGCTGTTGTCTCTGACAACAG
TTCTCTCTTTGTCTTTGACAAACTGTTGACAGTTTGACTCTAATGTGTTG
TGGAGAACCTGTTGGAATTTTGTCTTTTTGGGGATCTCTGAGCTTCTGTA
TCTGAATGTCTAAATCTCTTGATATACTTGGGTAGTTTTCAGCTATTATT
TCATTAACCAGGTTTTCTATTCCTTTTGTATTTTCATTGTCTTCTAGAAT
ACTGAAAATTCTAATATTAGTTTGCTTTATGGTATCCCATATGTCATGCA
GGCTTTGTTCATTCTTTTTTCTTTATTTTTGTCTAATGGGGTTATTTCAG
AAGACCTGTCTTCAAGTTCAGAAATTCTTTCTTCGTAGATGCTCTAGAAT
GTATTTTTTATTTCATTAAATGAATTCTTCAGTTTCAGGGTTTCTTGTTT
TCTTTTTAAATGATATCTCTCTCTTTGGTAAATTTCTCATTGATATCCTG
AGTTGTTTTTCTGGTTTCTTTGTATTGTTTATCTGTATGCGTTTGTATCT
CCCTGAGCTTCTTTAATATCATTATTTTTAATTCTTTTTCTGGCATTTCA
TGAATTTCTTTTGCATTGGAATCTTTTGGTAGAAAATTATTTTGATCCTT
TGGAGATGTCATATTTCCCTATGTTCCCATGTTTCTTGTGACCTTACTTC
TTTGATATCCACACATCTGGTGTAATCATCACTTCCATTTTTTTGAATTT
GCTTTCATAGGGTAGGACTTTTTCCTGAAGATTTGACTGGGGTGTTTGTT
GGCCAGGGCACTTTGGGTTTGAATCTGGGTGCATGCAGTAGTGTAGTCTC
TGTAAGATTTTTTTTCCTTTGTAAACAGCATCAGTGGTGTCTGTGATTTC
CTCAGTGGCATAGTGTGTGGTTGTGGAGGCTGTGGTGAACTTTTGCTGGG
GATGGTGACACCAGCTGGACTGATCCTCAGTCCTCAGTTGTGGCAGCAGT
TGGACAACCATGCCTGTACATTAGCCCCAGGGTGGCTTACATTAGTAATG
GTGTTAGTGGGTCCAGGCAGTCCAATTTTTGGGTCTCCAGGTGACTTGTT
TGGGTACCAGGAGTGGCAGTGATGGGCTGGGCAGCTGAGTGGGTCCACAG
GCCCCTGGGCAGTGAGCATGGCATGGGTTATGTCAGTAGCAGTGGTAGGA
GAACCTCTGGCTGTCCAGTTGTCTGTGCTTATGTCGGCAGTGACGGCGAT
TGGCTGGGTAGGCAAGTCCTAAAACCTGCAGGTGGCAAGTGTGAGTGGGA
ACCAGCTGTGGTGGTAGTGGCAGGTTGGGTGGGCCACATCCTCAGACCCC
CAGGTGGAATGCTCAGTTGACACTGGACGTGGACAAACTGGTGCGATCCC
AAGGCCCCCAGATAACATGCTTGGATACGTGGGAGTGGGGTGCTGAGCTG
GGCAGGGTGAGAGTATCCTCAGGCCCTCCAGTGGTGTTAGCAGGTGCTGT
TTGTGGTGGGCAGGAGCAGGATGATTTCCAATTTCCTGGTGGAATGTTCA
GGTGGGGGCAGCAGTGGCTGTGCTGTGCCCTGATGCTGGGGAGGGTGCAG
TTGCTGTCAGTGGGAGCAGTTGTAGGGAGTTGGCTAAGGAGTGTGCACTG
CAGCTGCAGGTGGAGGCTGTAGATGTGATGAAGCTGTACTCAGGGTGCAT
GCAAATTTGCATTTTGACACCTAGCGGCAGCAGCCTGCAATGGTGGCAGC
TGTAGGTGGTAGAGCTTGTCCTCAGGGCACATACCAATATATGGCAGCCC
TTCTGCTGGGAGCAGTGGGGTTATTGCCAATGGCTTGTGCTTTGGTCCCA
GAGGCGGCAGCCAGCAATGGAGGTGACTGTCGGTGGAGGATGTCAGTGGG
GCTCTAGGGGTGTGGATATGCAGGGGCTGTTGGGCTCCAGGGTAGGAGGC
ATTCTGGTGTGGGTTGGGCTTTAAAAATGGCACCGTGCTGTAGCTGCTTA
GGACTCAGGGGTGTGTTGGACCAGCATAAGCTCCCTCTCTAAAGCAATGT
CATTGTGCAGTCTCCAGGCAGCTCCCTATGTTACTCCCAGGGCCCATGAA
AGTTGACGGGCTCTCTTGTGTCTGGGATTGCAGGAGTTTGCAGTGAAAAT
GTGGGCCACTGGGAGTCTCTCACTTACTCTTTCCCCACATTGTGCAGGCT
CTCTAGGCTTCTGGCTGATCCTGGCTGAGCAGGCTGCCCCACTTCCCTCT
CCTTCCTTGCATTAGGTGTTTTCTATCACTTCTCTGTTGAATTTCCGTGT
TCTCTCTTAGATGACCTATTCAAAGTGTGATTATCTACTCGCTATTTTGG
TTCTTCTTTGTGGAGCAGGTGAGTACCAGATAACTCTAGTCAACCTTCTG
GACCCCTCTTCCCCCAATTTGAGATCTCTTCTTCTGTTGTCTGTAACTGA
GTTTAATGCTTGTTTGTTCATGTTAGGATTTTATATCATCGTCCTCAATT
AGGTTGTTAACTGGAATTTTATAATCTTTGTCCACAGGAAGTTTAAAATG
TATGATTTCTTGCATTGTGCTTTGTATGTAGTAATACACGATATTTATCC
AGTTAATGGATTTGACAGCCATTGCTGTCAAGGAGCAGTCCTTCTTTGTG
TATGAAGGGTGCCTTATCAATATTATTTCCATTTGTAACTTTATTTATTT
ATGTATTCATTTTTGAGACAGGGTCTTGCTGTGTCACCCAGACTGGAGTG
CGGTGGAGTGCGGAGGTTTGCTGCAGCCTCATCCTCCCAGGTTCAAGCAA
TTCTTCCGCTCCACTCCCAGAGTAGCTAGGACTACAAGTGCGTGCTGCCA
CGCCCAGCTAATTTTTTTCTTTTGTATGTTTTTGTAGAGATGAGGTTTCA
CCATGTTGCTGAGGCTTGTCTCCAACTTCTGGGCTCAAGCTATCTGCCCG
CCTCGGCCCCGCAAAGTGCTAGGATTACAGGTGTGAGACACTGCGCCCAG
CCCATTTGTAACTTTATTGTTTTCTCTTACAGGCAAATGTTCTGAAAAAG
ACTCTGCATG

[0481] CCND1 (Cyclin D1)

[0482] Cyclin D1 belongs to the highly conserved cyclin family, whose members are characterized by a dramatic periodicity in protein abundance throughout the cell cycle. Cyclins function as regulators of CDK kinases. Different cyclins exhibit distinct expression and degradation patterns which contribute to the temporal coordination of each mitotic event. This cyclin forms a complex with and functions as a regulatory subunit of CDK4 or CDK6, which are required for cell cycle G1/S transition. Regulatory component of the cyclin D1-CDK4 complex is believed to phosphorylates/interact and inhibit tumor suppressor retinoblastoma protein, RB1 to regulate cell-cycle during G1/S transition as phosphorylation of RB1 allows dissociation of the transcription factor E2F from the RB/E2F complex and the subsequent transcription of E2F target genes which are responsible for the progression through the G1 phase. Further, CCND1 expression is believed to be regulated positively by Rb. Mutations, amplification and overexpression of CCND1 alters cell cycle progression and are observed frequently in a variety of tumors including mantle cell lymphoma (characterized by the t(11; 14) rearrangement) and other B-cell lymphomas.

[0483] Protein: Cyclin D1 Gene: CCND1 (Homo sapiens, chromosome 11, 69455873-69469242 [NCBI Reference Sequence: NC_{—}000009.12]; start site location: 69456082; strand: positive)

Gene Identification

| | |
|---|---|
| GeneID | 595 |
| HGNC | 1582 |
| HPRD | 01346 |
| MIM | 168461 |

Targeted Sequences

| | | | Relative |
|---|---|---|---|
| | | | upstream |
| | | | location |
| | | | to gene |
| Sequence | Design | | start |
| ID No: | ID | Sequence (5′-3′) | site |
| 12129 | | CGCTGCTACTGCGCCGACAGCCCTC | 133 |
| 12242 | | CGGCAGAATGGGCGCATTTCCAAGA | 612 |
| 12287 | | ACGCCACGAGGGCACCCACGGGCGGA | 637 |
| 12332 | | CGGTGACCGCGGCCTGGGCGGATGG | 2755 |
| 12388 | | CGGGACTCAGCGCGGCTGCGCGCCG | 2907 |

Targeted Shift Sequences

| | | Relative |
|---|---|---|
| Sequence | | upstream |
| ID | | location to gene |
| No: | Sequence (5′-3′) | start site |
| 12129 | CGCTGCTACTGCGCCGACAGCCCTC | 133 |
| 12130 | GCTGCTACTGCGCCGACAGC | 134 |
| 12131 | CTGCTACTGCGCCGACAGCC | 135 |
| 12132 | TGCTACTGCGCCGACAGCCC | 136 |
| 12133 | GCTACTGCGCCGACAGCCCT | 137 |
| 12134 | CTACTGCGCCGACAGCCCTC | 138 |
| 12135 | TACTGCGCCGACAGCCCTCT | 139 |
| 12136 | ACTGCGCCGACAGCCCTCTG | 140 |
| 12137 | CTGCGCCGACAGCCCTCTGG | 141 |
| 12138 | TGCGCCGACAGCCCTCTGGA | 142 |
| 12139 | GCGCCGACAGCCCTCTGGAG | 143 |
| 12140 | CGCCGACAGCCCTCTGGAGG | 144 |
| 12141 | GCCGACAGCCCTCTGGAGGC | 145 |
| 12142 | CCGACAGCCCTCTGGAGGCT | 146 |
| 12143 | CGACAGCCCTCTGGAGGCTC | 147 |
| 12144 | TCGCTGCTACTGCGCCGACA | 132 |
| 12145 | CTCGCTGCTACTGCGCCGAC | 131 |
| 12146 | GCTCGCTGCTACTGCGCCGA | 130 |
| 12147 | TGCTCGCTGCTACTGCGCCG | 129 |
| 12148 | CTGCTCGCTGCTACTGCGCC | 128 |
| 12149 | GCTGCTCGCTGCTACTGCGC | 127 |
| 12150 | TGCTGCTCGCTGCTACTGCG | 126 |
| 12151 | CTGCTGCTCGCTGCTACTGC | 125 |
| 12152 | TCTGCTGCTCGCTGCTACTG | 124 |
| 12153 | CTCTGCTGCTCGCTGCTACT | 123 |
| 12154 | ACTCTGCTGCTCGCTGCTAC | 122 |
| 12155 | GACTCTGCTGCTCGCTGCTA | 121 |
| 12156 | GGACTCTGCTGCTCGCTGCT | 120 |
| 12157 | CGGACTCTGCTGCTCGCTGC | 119 |
| 12158 | GCGGACTCTGCTGCTCGCTG | 118 |
| 12159 | TGCGGACTCTGCTGCTCGCT | 117 |
| 12160 | GTGCGGACTCTGCTGCTCGC | 116 |
| 12161 | CGTGCGGACTCTGCTGCTCG | 115 |
| 12162 | GCGTGCGGACTCTGCTGCTC | 114 |
| 12163 | AGCGTGCGGACTCTGCTGCT | 113 |
| 12164 | GAGCGTGCGGACTCTGCTGC | 112 |
| 12165 | GGAGCGTGCGGACTCTGCTG | 111 |
| 12166 | CGGAGCGTGCGGACTCTGCT | 110 |
| 12167 | CCGGAGCGTGCGGACTCTGC | 109 |
| 12168 | GCCGGAGCGTGCGGACTCTG | 108 |
| 12169 | CGCCGGAGCGTGCGGACTCT | 107 |
| 12170 | TCGCCGGAGCGTGCGGACTC | 106 |
| 12171 | CTCGCCGGAGCGTGCGGACT | 105 |
| 12172 | CCTCGCCGGAGCGTGCGGAC | 104 |
| 12173 | CCCTCGCCGGAGCGTGCGGA | 103 |
| 12174 | CCCCTCGCCGGAGCGTGCGG | 102 |
| 12175 | GCCCCTCGCCGGAGCGTGCG | 101 |
| 12176 | TGCCCCTCGCCGGAGCGTGC | 100 |
| 12177 | CTGCCCCTCGCCGGAGCGTG | 99 |
| 12178 | TCTGCCCCTCGCCGGAGCGT | 98 |
| 12179 | TTCTGCCCCTCGCCGGAGCG | 97 |
| 12180 | CTTCTGCCCCTCGCCGGAGC | 96 |
| 12181 | TCTTCTGCCCCTCGCCGGAG | 95 |
| 12182 | CTCTTCTGCCCCTCGCCGGA | 94 |
| 12183 | GCTCTTCTGCCCCTCGCCGG | 93 |
| 12184 | CGCTCTTCTGCCCCTCGCCG | 92 |
| 12185 | GCGCTCTTCTGCCCCTCGCC | 91 |
| 12186 | CGCGCTCTTCTGCCCCTCGC | 90 |
| 12187 | TCGCGCTCTTCTGCCCCTCG | 89 |
| 12188 | CTCGCGCTCTTCTGCCCCTC | 88 |
| 12189 | CCTCGCGCTCTTCTGCCCCT | 87 |
| 12190 | CCCTCGCGCTCTTCTGCCCC | 86 |
| 12191 | TCCCTCGCGCTCTTCTGCCC | 85 |
| 12192 | CTCCCTCGCGCTCTTCTGCC | 84 |
| 12193 | GCTCCCTCGCGCTCTTCTGC | 83 |
| 12194 | CGCTCCCTCGCGCTCTTCTG | 82 |
| 12195 | GCGCTCCCTCGCGCTCTTCT | 81 |
| 12196 | CGCGCTCCCTCGCGCTCTTC | 80 |
| 12197 | CCGCGCTCCCTCGCGCTCTT | 79 |
| 12198 | CCCGCGCTCCCTCGCGCTCT | 78 |
| 12199 | CCCCGCGCTCCCTCGCGCTC | 77 |
| 12200 | GCCCCGCGCTCCCTCGCGCT | 76 |
| 12201 | TGCCCCGCGCTCCCTCGCGC | 75 |
| 12202 | CTGCCCCGCGCTCCCTCGCG | 74 |
| 12203 | GCTGCCCCGCGCTCCCTCGC | 73 |
| 12204 | TGCTGCCCCGCGCTCCCTCG | 72 |
| 12205 | CTGCTGCCCCGCGCTCCCTC | 71 |
| 12206 | TCTGCTGCCCCGCGCTCCCT | 70 |
| 12207 | TTCTGCTGCCCCGCGCTCCC | 69 |
| 12208 | CTTCTGCTGCCCCGCGCTCC | 68 |
| 12209 | GCTTCTGCTGCCCCGCGCTC | 67 |
| 12210 | CGCTTCTGCTGCCCCGCGCT | 66 |
| 12211 | TCGCTTCTGCTGCCCCGCGC | 65 |
| 12212 | CTCGCTTCTGCTGCCCCGCG | 64 |
| 12213 | TCTCGCTTCTGCTGCCCCGC | 63 |
| 12214 | CTCTCGCTTCTGCTGCCCCG | 62 |
| 12215 | GCTCTCGCTTCTGCTGCCCC | 61 |
| 12216 | GGCTCTCGCTTCTGCTGCCC | 60 |
| 12217 | CGGCTCTCGCTTCTGCTGCC | 59 |
| 12218 | TCGGCTCTCGCTTCTGCTGC | 58 |
| 12219 | CTCGGCTCTCGCTTCTGCTG | 57 |
| 12220 | GCTCGGCTCTCGCTTCTGCT | 56 |
| 12221 | CGCTCGGCTCTCGCTTCTGC | 55 |
| 12222 | GCGCTCGGCTCTCGCTTCTG | 54 |
| 12223 | CGCGCTCGGCTCTCGCTTCT | 53 |
| 12224 | CCGCGCTCGGCTCTCGCTTC | 52 |
| 12225 | TCCGCGCTCGGCTCTCGCTT | 51 |
| 12226 | GTCCGCGCTCGGCTCTCGCT | 50 |
| 12227 | GGTCCGCGCTCGGCTCTCGC | 49 |
| 12228 | GGGTCCGCGCTCGGCTCTCG | 48 |
| 12229 | TGGGTCCGCGCTCGGCTCTC | 47 |
| 12230 | CTGGGTCCGCGCTCGGCTCT | 46 |
| 12231 | GCTGGGTCCGCGCTCGGCTC | 45 |
| 12232 | GGCTGGGTCCGCGCTCGGCT | 44 |
| 12233 | TGGCTGGGTCCGCGCTCGGC | 43 |
| 12234 | CTGGCTGGGTCCGCGCTCGG | 42 |
| 12235 | CCTGGCTGGGTCCGCGCTCG | 41 |
| 12236 | TCCTGGCTGGGTCCGCGCTC | 40 |
| 12237 | GTCCTGGCTGGGTCCGCGCT | 39 |
| 12238 | GGTCCTGGCTGGGTCCGCGC | 38 |
| 12239 | GGGTCCTGGCTGGGTCCGCG | 37 |
| 12240 | TGGGTCCTGGCTGGGTCCGC | 36 |
| 12241 | GTGGGTCCTGGCTGGGTCCG | 35 |
| 12242 | CGGCAGAATGGGCGCATTTCCAAGA | 612 |
| 12243 | GGCAGAATGGGCGCATTTCC | 613 |
| 12244 | GCAGAATGGGCGCATTTCCA | 614 |
| 12245 | CAGAATGGGCGCATTTCCAA | 615 |
| 12246 | AGAATGGGCGCATTTCCAAG | 616 |
| 12247 | GAATGGGCGCATTTCCAAGA | 617 |
| 12248 | AATGGGCGCATTTCCAAGAA | 618 |
| 12249 | ATGGGCGCATTTCCAAGAAC | 619 |
| 12250 | TGGGCGCATTTCCAAGAACG | 620 |
| 12251 | GGGCGCATTTCCAAGAACGC | 621 |
| 12252 | GGCGCATTTCCAAGAACGCC | 622 |
| 12253 | GCGCATTTCCAAGAACGCCA | 623 |
| 12254 | CGCATTTCCAAGAACGCCAC | 624 |
| 12255 | GCATTTCCAAGAACGCCACG | 625 |
| 12256 | CATTTCCAAGAACGCCACGA | 626 |
| 12257 | ATTTCCAAGAACGCCACGAG | 627 |
| 12258 | TTTCCAAGAACGCCACGAGG | 628 |
| 12259 | TTCCAAGAACGCCACGAGGG | 629 |
| 12260 | TCCAAGAACGCCACGAGGGC | 630 |
| 12261 | CCAAGAACGCCACGAGGGCA | 631 |
| 12262 | CAAGAACGCCACGAGGGCAC | 632 |
| 12263 | AAGAACGCCACGAGGGCACC | 633 |
| 12264 | AGAACGCCACGAGGGCACCC | 634 |
| 12265 | GAACGCCACGAGGGCACCCA | 635 |
| 12266 | AACGCCACGAGGGCACCCAC | 636 |
| 12267 | ACGCCACGAGGGCACCCACG | 637 |
| 12268 | CGCCACGAGGGCACCCACGG | 638 |
| 12269 | GCCACGAGGGCACCCACGGG | 639 |
| 12270 | CCACGAGGGCACCCACGGGC | 640 |
| 12271 | CACGAGGGCACCCACGGGCG | 641 |
| 12272 | ACGAGGGCACCCACGGGCGG | 642 |
| 12273 | CGAGGGCACCCACGGGCGGA | 643 |
| 12274 | GAGGGCACCCACGGGCGGAC | 644 |
| 12275 | AGGGCACCCACGGGCGGACA | 645 |
| 12276 | GGGCACCCACGGGCGGACAG | 646 |
| 12277 | GGCACCCACGGGCGGACAGA | 647 |
| 12278 | GCACCCACGGGCGGACAGAC | 648 |
| 12279 | CACCCACGGGCGGACAGACG | 649 |
| 12280 | ACCCACGGGCGGACAGACGG | 650 |
| 12281 | CCCACGGGCGGACAGACGGC | 651 |
| 12282 | CCACGGGCGGACAGACGGCC | 652 |
| 12283 | CACGGGCGGACAGACGGCCA | 653 |
| 12284 | CCGGCAGAATGGGCGCATTT | 611 |
| 12285 | GCCGGCAGAATGGGCGCATT | 610 |
| 12286 | AGCCGGCAGAATGGGCGCAT | 609 |
| 12287 | ACGCCACGAGGGCACCCACGGGCGGA | 637 |
| 12288 | CGCCACGAGGGCACCCACGG | 638 |
| 12289 | GCCACGAGGGCACCCACGGG | 639 |
| 12290 | CCACGAGGGCACCCACGGGC | 640 |
| 12291 | CACGAGGGCACCCACGGGCG | 641 |
| 12292 | ACGAGGGCACCCACGGGCGG | 642 |
| 12293 | CGAGGGCACCCACGGGCGGA | 643 |
| 12294 | GAGGGCACCCACGGGCGGAC | 644 |
| 12295 | AGGGCACCCACGGGCGGACA | 645 |
| 12296 | GGGCACCCACGGGCGGACAG | 646 |
| 12297 | GGCACCCACGGGCGGACAGA | 647 |
| 12298 | GCACCCACGGGCGGACAGAC | 648 |
| 12299 | CACCCACGGGCGGACAGACG | 649 |
| 12300 | ACCCACGGGCGGACAGACGG | 650 |
| 12301 | CCCACGGGCGGACAGACGGC | 651 |
| 12302 | CCACGGGCGGACAGACGGCC | 652 |
| 12303 | CACGGGCGGACAGACGGCCA | 653 |
| 12304 | AACGCCACGAGGGCACCCAC | 636 |
| 12305 | GAACGCCACGAGGGCACCCA | 635 |
| 12306 | AGAACGCCACGAGGGCACCC | 634 |
| 12307 | AAGAACGCCACGAGGGCACC | 633 |
| 12308 | CAAGAACGCCACGAGGGCAC | 632 |
| 12309 | CCAAGAACGCCACGAGGGCA | 631 |
| 12310 | TCCAAGAACGCCACGAGGGC | 630 |
| 12311 | TTCCAAGAACGCCACGAGGG | 629 |
| 12312 | TTTCCAAGAACGCCACGAGG | 628 |
| 12313 | ATTTCCAAGAACGCCACGAG | 627 |
| 12314 | CATTTCCAAGAACGCCACGA | 626 |
| 12315 | GCATTTCCAAGAACGCCACG | 625 |
| 12316 | CGCATTTCCAAGAACGCCAC | 624 |
| 12317 | GCGCATTTCCAAGAACGCCA | 623 |
| 12318 | GGCGCATTTCCAAGAACGCC | 622 |
| 12319 | GGGCGCATTTCCAAGAACGC | 621 |
| 12320 | TGGGCGCATTTCCAAGAACG | 620 |
| 12321 | ATGGGCGCATTTCCAAGAAC | 619 |
| 12322 | AATGGGCGCATTTCCAAGAA | 618 |
| 12323 | GAATGGGCGCATTTCCAAGA | 617 |
| 12324 | AGAATGGGCGCATTTCCAAG | 616 |
| 12325 | CAGAATGGGCGCATTTCCAA | 615 |
| 12326 | GCAGAATGGGCGCATTTCCA | 614 |
| 12327 | GGCAGAATGGGCGCATTTCC | 613 |
| 12328 | CGGCAGAATGGGCGCATTTC | 612 |
| 12329 | CCGGCAGAATGGGCGCATTT | 611 |
| 12330 | GCCGGCAGAATGGGCGCATT | 610 |
| 12331 | AGCCGGCAGAATGGGCGCAT | 609 |
| 12332 | CGGTGACCGCGGCCTGGGCGGATGG | 2755 |
| 12333 | GGTGACCGCGGCCTGGGCGG | 2756 |
| 12334 | GTGACCGCGGCCTGGGCGGA | 2757 |
| 12335 | TGACCGCGGCCTGGGCGGAT | 2758 |
| 12336 | GACCGCGGCCTGGGCGGATG | 2759 |
| 12337 | ACCGCGGCCTGGGCGGATGG | 2760 |
| 12338 | CCGCGGCCTGGGCGGATGGT | 2761 |
| 12339 | CGCGGCCTGGGCGGATGGTC | 2762 |
| 12340 | GCGGCCTGGGCGGATGGTCG | 2763 |
| 12341 | CGGCCTGGGCGGATGGTCGG | 2764 |
| 12342 | GGCCTGGGCGGATGGTCGGT | 2765 |
| 12343 | GCCTGGGCGGATGGTCGGTC | 2766 |
| 12344 | CCTGGGCGGATGGTCGGTCA | 2767 |
| 12345 | CTGGGCGGATGGTCGGTCAG | 2768 |
| 12346 | TGGGCGGATGGTCGGTCAGG | 2769 |
| 12347 | CCGGTGACCGCGGCCTGGGC | 2754 |
| 12348 | CCCGGTGACCGCGGCCTGGG | 2753 |
| 12349 | CCCCGGTGACCGCGGCCTGG | 2752 |
| 12350 | GCCCCGGTGACCGCGGCCTG | 2751 |
| 12351 | CGCCCCGGTGACCGCGGCCT | 2750 |
| 12352 | CCGCCCCGGTGACCGCGGCC | 2749 |
| 12353 | CCCGCCCCGGTGACCGCGGC | 2748 |
| 12354 | CCCCGCCCCGGTGACCGCGG | 2747 |
| 12355 | CCCCCGCCCCGGTGACCGCG | 2746 |
| 12356 | GCCCCCGCCCCGGTGACCGC | 2745 |
| 12357 | GGCCCCCGCCCCGGTGACCG | 2744 |
| 12358 | TGGCCCCCGCCCCGGTGACC | 2743 |
| 12359 | CTGGCCCCCGCCCCGGTGAC | 2742 |
| 12360 | CCTGGCCCCCGCCCCGGTGA | 2741 |
| 12361 | CCCTGGCCCCCGCCCCGGTG | 2740 |
| 12362 | CCCCTGGCCCCCGCCCCGGT | 2739 |
| 12363 | CCCCCTGGCCCCCGCCCCGG | 2738 |
| 12364 | GCCCCCTGGCCCCCGCCCCG | 2737 |
| 12365 | CGCCCCCTGGCCCCCGCCCC | 2736 |
| 12366 | TCGCCCCCTGGCCCCCGCCC | 2735 |
| 12367 | CTCGCCCCCTGGCCCCCGCC | 2734 |
| 12368 | CCTCGCCCCCTGGCCCCCGC | 2733 |
| 12369 | TCCTCGCCCCCTGGCCCCCG | 2732 |
| 12370 | TTCCTCGCCCCCTGGCCCCC | 2731 |
| 12371 | TTTCCTCGCCCCCTGGCCCC | 2730 |
| 12372 | CTTTCCTCGCCCCCTGGCCC | 2729 |
| 12373 | GCTTTCCTCGCCCCCTGGCC | 2728 |
| 12374 | CGCTTTCCTCGCCCCCTGGC | 2727 |
| 12375 | ACGCTTTCCTCGCCCCCTGG | 2726 |
| 12376 | CACGCTTTCCTCGCCCCCTG | 2725 |
| 12377 | TCACGCTTTCCTCGCCCCCT | 2724 |
| 12378 | TTCACGCTTTCCTCGCCCCC | 2723 |
| 12379 | CTTCACGCTTTCCTCGCCCC | 2722 |
| 12380 | CCTTCACGCTTTCCTCGCCC | 2721 |
| 12381 | ACCTTCACGCTTTCCTCGCC | 2720 |
| 12382 | CACCTTCACGCTTTCCTCGC | 2719 |
| 12383 | TCACCTTCACGCTTTCCTCG | 2718 |
| 12384 | ATCACCTTCACGCTTTCCTC | 2717 |
| 12385 | AATCACCTTCACGCTTTCCT | 2716 |
| 12386 | AAATCACCTTCACGCTTTCC | 2715 |
| 12387 | GAAATCACCTTCACGCTTTC | 2714 |
| 12388 | CGGGACTCAGCGCGGCTGCGCGCCG | 2907 |
| 12389 | GGGACTCAGCGCGGCTGCGC | 2908 |
| 12390 | GGACTCAGCGCGGCTGCGCG | 2909 |
| 12391 | GACTCAGCGCGGCTGCGCGC | 2910 |
| 12392 | ACTCAGCGCGGCTGCGCGCC | 2911 |
| 12393 | CTCAGCGCGGCTGCGCGCCG | 2912 |
| 12394 | TCAGCGCGGCTGCGCGCCGC | 2913 |
| 12395 | CAGCGCGGCTGCGCGCCGCG | 2914 |
| 12396 | AGCGCGGCTGCGCGCCGCGG | 2915 |
| 12397 | GCGCGGCTGCGCGCCGCGGG | 2916 |
| 12398 | CGCGGCTGCGCGCCGCGGGG | 2917 |
| 12399 | GCGGCTGCGCGCCGCGGGGC | 2918 |
| 12400 | CGGCTGCGCGCCGCGGGGCT | 2919 |
| 12401 | GGCTGCGCGCCGCGGGGCTC | 2920 |
| 12402 | GCTGCGCGCCGCGGGGCTCG | 2921 |
| 12403 | CTGCGCGCCGCGGGGCTCGG | 2922 |
| 12404 | TGCGCGCCGCGGGGCTCGGG | 2923 |
| 12405 | GCGCGCCGCGGGGCTCGGGG | 2924 |
| 12406 | CGCGCCGCGGGGCTCGGGGC | 2925 |
| 12407 | GCGCCGCGGGGCTCGGGGCT | 2926 |
| 12408 | CGCCGCGGGGCTCGGGGCTT | 2927 |
| 12409 | GCCGCGGGGCTCGGGGCTTG | 2928 |
| 12410 | CCGCGGGGCTCGGGGCTTGG | 2929 |
| 12411 | CGCGGGGCTCGGGGCTTGGG | 2930 |
| 12412 | GCGGGGCTCGGGGCTTGGGT | 2931 |
| 12413 | CGGGGCTCGGGGCTTGGGTT | 2932 |
| 12414 | GGGGCTCGGGGCTTGGGTTG | 2933 |
| 12415 | GGGCTCGGGGCTTGGGTTGG | 2934 |
| 12416 | GGCTCGGGGCTTGGGTTGGG | 2935 |
| 12417 | GCTCGGGGCTTGGGTTGGGG | 2936 |
| 12418 | CTCGGGGCTTGGGTTGGGGG | 2937 |
| 12419 | TCGGGGCTTGGGTTGGGGGC | 2938 |
| 12420 | CGGGGCTTGGGTTGGGGGCG | 2939 |
| 12421 | CCGGGACTCAGCGCGGCTGC | 2906 |
| 12422 | CCCGGGACTCAGCGCGGCTG | 2905 |
| 12423 | CCCCGGGACTCAGCGCGGCT | 2904 |
| 12424 | ACCCCGGGACTCAGCGCGGC | 2903 |
| 12425 | GACCCCGGGACTCAGCGCGG | 2902 |
| 12426 | AGACCCCGGGACTCAGCGCG | 2901 |
| 12427 | CAGACCCCGGGACTCAGCGC | 2900 |
| 12428 | GCAGACCCCGGGACTCAGCG | 2899 |
| 12429 | CGCAGACCCCGGGACTCAGC | 2898 |
| 12430 | ACGCAGACCCCGGGACTCAG | 2897 |
| 12431 | GACGCAGACCCCGGGACTCA | 2896 |
| 12432 | CGACGCAGACCCCGGGACTC | 2895 |
| 12433 | GCGACGCAGACCCCGGGACT | 2894 |
| 12434 | CGCGACGCAGACCCCGGGAC | 2893 |
| 12435 | CCGCGACGCAGACCCCGGGA | 2892 |
| 12436 | GCCGCGACGCAGACCCCGGG | 2891 |
| 12437 | CGCCGCGACGCAGACCCCGG | 2890 |
| 12438 | GCGCCGCGACGCAGACCCCG | 2889 |
| 12439 | CGCGCCGCGACGCAGACCCC | 2888 |
| 12440 | GCGCGCCGCGACGCAGACCC | 2887 |
| 12441 | GGCGCGCCGCGACGCAGACC | 2886 |
| 12442 | CGGCGCGCCGCGACGCAGAC | 2885 |
| 12443 | CCGGCGCGCCGCGACGCAGA | 2884 |
| 12444 | ACCGGCGCGCCGCGACGCAG | 2883 |
| 12445 | AACCGGCGCGCCGCGACGCA | 2882 |
| 12446 | GAACCGGCGCGCCGCGACGC | 2881 |
| 12447 | GGAACCGGCGCGCCGCGACG | 2880 |
| 12448 | AGGAACCGGCGCGCCGCGAC | 2879 |
| 12449 | CAGGAACCGGCGCGCCGCGA | 2878 |
| 12450 | TCAGGAACCGGCGCGCCGCG | 2877 |
| 12451 | TTCAGGAACCGGCGCGCCGC | 2876 |
| 12452 | ATTCAGGAACCGGCGCGCCG | 2875 |
| 12453 | CATTCAGGAACCGGCGCGCC | 2874 |
| 12454 | TCATTCAGGAACCGGCGCGC | 2873 |
| 12455 | TTCATTCAGGAACCGGCGCG | 2872 |
| 12456 | GTTCATTCAGGAACCGGCGC | 2871 |
| 12457 | CGTTCATTCAGGAACCGGCG | 2870 |
| 12458 | GCGTTCATTCAGGAACCGGC | 2869 |
| 12459 | CGCGTTCATTCAGGAACCGG | 2868 |
| 12460 | GCGCGTTCATTCAGGAACCG | 2867 |
| 12461 | AGCGCGTTCATTCAGGAACC | 2866 |
| 12462 | GAGCGCGTTCATTCAGGAAC | 2865 |
| 12463 | GGAGCGCGTTCATTCAGGAA | 2864 |
| 12464 | GGGAGCGCGTTCATTCAGGA | 2863 |
| 12465 | AGGGAGCGCGTTCATTCAGG | 2862 |
| 12466 | AAGGGAGCGCGTTCATTCAG | 2861 |
| 12467 | GAAGGGAGCGCGTTCATTCA | 2860 |
| 12468 | GGAAGGGAGCGCGTTCATTC | 2859 |
| 12469 | GGGAAGGGAGCGCGTTCATT | 2858 |

Hot Zones (Relative upstream location to gene start site)
1-250
550-700
2700-2300

### Examples

Genetic Code (5′ Upstream Region)

(SEQ ID NO: 13676)

GGCCCTGCCGCCCAGAACTCGCTGGGCAAGTCGTGCCCCGCGTGAACACA
CAGAAGGGGCTTGGGGACCGAGCGCGGCCCATCAGTCCCTCAGACCCTGA
GGACCCAGAATTCCCTAAGGGGTCCGAATCCGAGTCCTGCCCCCAGCCCT
TAAGGCACGGGCTCCAGGGACCCCAGGGGAAGGGCGCGGGGCATTAGGTA
CGCAACCCGTTTCCCCGCACCTGGAAAAAAACTCCCTTTCCCTCCCCTCC
CCTGCTTGTTGAGTGTCCGGATAACCAGAACTCTAAGGCGCCCCGTAATA
ACGACCCCGCTGTCCCTCCACCCACCCCCAAGTGCCAAAGCGAGGGATGG
AAGCGCTTTCAAGCGTTCCAAGGGCATTGAGGAGCGAGCTGGAGAGGCGC
GGGGATGCGGGGTCCTCCCCGCAGTCTTCCGGAAAGGGCGGGGGAGGGCG
CGGCAAGTTCCGGAGTGGGGCATGCCGTGGGAGCCCACGAGGGCCTCAGC
GCGGATCCTCCGCCGGAAAACCGGCTCCCGCGAGCCGCCGCCGCAGGTTT
CCTAGGCCCCGCGAGTCCCGCAGCGAAGCCCTGCGTCTCCGTCCGACGCG
GGGGTCTGCTCAGCCTCGGGTGGGCCGCGGCCAGGCCTGACTGCGGGGGA
GAGGGCCGAACGTGACCTCCGAGGTCACCCCCAGCCAGCTTTCTCTCCTG
TGGTCGGAAGTGGTTTTCTTCTCGATCTGGGCGCCTACTCCCCACCACTT
GGTCTGAGAGGGGCTGGGGCCGGAAGGCCAGGGAATCTCTGGTGGATTTG
GGGGTTCATATTGCTCAGGGTACCAGCCGATGCGTTTTGAGGGGCGGGAG
TCGAGGAATTAGAATCGCCTTTAACCCTCAAGAGTTGCGCCTTCAGCCTC
GGGATCCCAGATGCGTCGTTGGAGCCAGGGCCGCCCCCCTACCTGTTGGG
TTTGCGTTTTAACTCCAGCGCACACCTTGCCGGCAGCCCTCGGAGCTAGG
GGAGGGGTCTCGTTTCCCCGCAGCCCGCCGGACAGACGACTGGGGCACGG
GAGGGGCGGTGGCAGGGTGGTCTGTGTGTGGCTGAAACTAATTGATCTGG
AGCGGAAACGCACGTCTGCGGTTGGGGCGATGGGGGGGGCGGTGCGGCTG
TCCATGTGCCGAGCGTGTGGCTGTCTCGGGTGGGCACTGGGGCCGGAGTT
CGCCCCGGCCCACCTCGCAGTTTTGGGGCGCCTGGGATCGGCGCTACGTA
AGCGAAGCAGAGCTGCCATAGCACGTGGGCCGCCACGCGCACCCCAAAAG
CAAGCAGTGTGGGGGGAAGGGGAGCTCGAGCGCCTTCGGAGCCCAGGGGC
CGGCTTTCGGAAGCGTTTTCCCGGGCGACTTAAGGGCTTAACAATGGAAA
ACTCGCGGAGCCTGAGCCAAGTCCTTTCAAGTCGCCGCCAGGTATGCGGC
TGCAGGTGACCCCACCTGGGTGCGCCCGCCCGCCAGCCGCCCTGGTGGAA
AAGCGGGTGCGGGAGGTCGCTGGCGAAAGGTCGGGACTGGTCCCTGCACC
ACCCGCCCCCAACCCAAGCCCCGAGCCCCGCGGCGCGCAGCCGCGCTGAG
TCCCGGGGTCTGCGTCGCGGCGCGCCGGTTCCTGAATGAACGCGCTCCCT
TCCCCCGCCTGAATGAAGGTTCCCACAGCCAGGGACGGTGGCGAACACGC
GCCTGCAGCGGAATTCGCTTTCTCCTGACCGACCATCCGCCCAGGCCGCG
GTCACCGGGGCGGGGGCCAGGGGGCGAGGAAAGCGTGAAGGTGATTTCAG
TTAATTTTGGATTTTCTTTCAAACAACGTGGTTACCCTCCCGACTGGGCC
ACTTGCCCTTTGTCTCCAAATGGTCACCAAGAAATAAGAACAGAGCACTT
TAAATGAGCCCAGAATCCGCAGTTCCTGCTTCGTGGTGGGTTTTAAGAAG
ACAGTGTAAAGTAAAACTGCAACCGAAAAGTTTTTTAAAGTTGCTTTTCT
CTTTGGAAAAAATAAAATCAAAATGCTTTCTCTGCGCTTCTTGAAGCAAT
GACCCTCAAAAGCCCAGAGGTATTGGCCCCCTCGGGGGACCCGGGGGCCG
CCAAGCAGGGTTCCCCCAGGTGGGGGCTGGGCAGCTGGCGCTCCCCGCCG
GGCCCCAAATTCCAGCGCCGGGCCCCAAATTCCAGCGCCTCCCCCGCGGG
TTCCTGGACGGCTCTTTACGCTCGCTAACCGGGCTTGCAATTTTGCGCTC
GTCCCTGAGCCGGGAAATCAACGAAGTTCCTAGTCGAGATCTGCCCGGTC
CGCCTAGTAACAGCGCCGCGCCCCCATTGGCTCATGCTAATTCCAGTTTC
CTCTGTCTTGCGCCCGGGATGGGGGGGTGAAGCTCCCTCCTGGACCCAGA
GCCGGTTGTGCCGGAGTGGGCGAGCCTCTTTATGCCCTGCTGCCCCTAGC
CGACTTCGGCCCGCTTCGCGCCTCGGGCTGGGCCAGGGCGCACGCGGGGC
TCGGGGCCCCTCGCCCCACGGGATGGGAGAGGCCGGGTGATAGCTCCGGG
CCCCATAAATCATCCAGGCGGCCGCCGGGTCGGGATTTTATGAATGAAAA
AGCAGCTGGGCCGCCCTTGTGCGCGGGCTGATGCTCTGAGGCTTGGCTAT
GCGGGGGCCAACGCGATTGTGGGTGCTCGGGGAGTGGGGGGGGGCACGAC
CGTAGGTGCTCCCTGCTGGGGCAACCCATCGCTCCCCATGCGGAATCCGG
GGGTAATTACCCCCCCAGGACCCGGAATATTAGTAATCCTAATTCCCGGC
GGGGGAGGGGGCGCGGGAGGAATTCACCCTGAAAGGTGGGGGTGGGGGGG
GTCGCATCTTGCTGTGAGCACCCTGGCGAAGGGGAGAGGGCTTTTTCTAT
CAGTTTTCTTTGAGCTTTTACTGTTAAGAGGGTACGGTGGTTTGATGACA
CTGAACTATATTCAAAAGGAAGTAAATGAACAGTTTTCTTAATTTGGGGC
AGGTACTGTAAAAATAAAAACAAAAGTTAAGACAGTAAAATGTCCTTTTA
TTTTTTAATGCACCAAAGAGACAGAACCTGTAATTTTAAAAACTGTGTAT
TTTAATTTACATCTGCTTAAGTTTGCGATAATATTGGGGACCCTCTCATG
TAACCACGAACACCTATCGATTTTGCTAAAAATCAGATCAGTACACTCGT
TTGTTTAATTGATAATTGTTCTGAATTATGCCGGCTCCTGCCAGCCCCCT
CACGCTCACGAATTCAGTCCCAGGGCAAATTCTAAAGGTGAAGGGACGTC
TACACCCCCAACAAAACCAATTAGGAACCTTCGGTGGTCTTGTCCCAGGC
AGAGGGGACTAATATTTCCAGCAATTTAATTTCTTTTTTAATTAAAAAAA
ATGAGTCAGAATGGAGATCACTGTTTCTCAGCTTTCCATTCAGAGGTGTG
TTTCTCCCGGTTAAATTGCCGGCACGGGAAGGGAGGGGGTGCAGTTGGGG
ACCCCCGCAAGGACCGACTGGTCAAGGTAGGAAGGCAGCCCGAAGAGTCT
CCAGGCTAGAAGGACAAGATGAAGGAAATGCTGGCCACCATCTTGGGCTG
CTGCTGGAATTTTCGGGCATTTATTTTATTTTATTTTTTGAGCGAGCGCA
TGCTAAGCTGAAATCCCTTTAACTTTTAGGGTTACCCCCTTGGGCATTTG
CAACGACGCCCCTGTGCGCCGGAATGAAACTTGCACAGGGGTTGTGTGCC
CGGTCCTCCCCGTCCTTGCATGCTAAATTAGTTCTTGCAATTTACACGTG
TTAATGAAAATGAAAGAAGATGCAGTCGCTGAGATTCTTTGGCCGTCTGT
CCGCCCGTGGGTGCCCTCGTGGCGTTCTTGGAAATGCGCCCATTCTGCCG
GCTTGGATATGGGGTGTCGCCGCGCCCCAGTCACCCCTTCTCGTGGTCTC
CCCAGGCTGCGTGTGGCCTGCCGGCCTTCCTAGTTGTCCCCTACTGCAGA
GCCACCTCCACCTCACCCCCTAAATCCCGGGGGACCCACTCGAGGCGGAC
GGGGCCCCCTGCACCCCTCTTCCCTGGCGGGGAGAAAGGCTGCAGCGGGG
CGATTTGCATTTCTATGAAAACCGGACTACAGGGGCAACTCCGCCGCAGG
GCAGGCGCGGCGCCTCAGGGATGGCTTTTGGGCTCTGCCCCTCGCTGCTC
CCGGCGTTTGGCGCCCGCGCCCCCTCCCCCTGCGCCCGCCCCCGCCCCCC
TCCCGCTCCCATTCTCTGCCGGGCTTTGATCTTTGCTTAACAACAGTAAC
GTCACACGGACTACAGGGGAGTTTTGTTGAAGTTGCAAAGTCCTGGAGCC
TCCAGAGGGCTGTCGGCGCAGTAGCAGCGAGCAGCAGAGTCCGCACGCTC
CGGCGAGGGGCAGAAGAGCGCGAGGGAGCGCGGGGCAGCAGAAGCGAGAG
CCGAGCGCGGACCCAGCCAGGACCCACAGCCCTCCCCAGCTGCCCAGGAA
GAGCCCCAGCCATG

[0485] MIF1

[0486] MIF1 (macrophage migration inhibitory factor 1) is a lymphokine involved in cell-mediated immunity, immunoregulation, and inflammation. MIF forms a homotrimer with three catalytic sites. The MIF homotrimer can enter a cell via endocytosis where it interacts with intracellular proteins. This interaction results in downregulating MAPK signals leading to activation of Cyclin D1 and subsequent cellular proliferation. Depending on the cellular environment, MIF may also have antioxidant activity which would inhibit apoptosis. Apoptosis can also be inhibited via a MIF-CD74 complex. MIF has been associated with inflammation, including rheumatoid arthritis, sepsis, and cancer.

[0487] Protein: MIF1 Gene: MIF1 (Homo sapiens, chromosome 22, 24236565-24237409[NCBI Reference Sequence: NC_{—}000022.10]; start site location: 24236662; strand: positive)

Gene Identification

| | |
|---|---|
| GeneID | 4282 |
| HGNC | 7097 |
| HPRD | 01091 |
| MIM | 153620 |

Targeted Sequences

| | | | Relative upstream |
|---|---|---|---|
| Sequence | Design | | location to gene start |
| ID No: | ID | Sequence (5′-3′) | site |
| 12470 | | GACCCGCGCAGAGGCACAGACGC | 22 |
| 12490 | | CGCCACCGCCGGCGCCAGGCCCCGCCCCCGCG | 123 |
| 12701 | | CGTTCCTCCAGCAACCGCCGCTAAGCCCGGCG | 238 |
| 12902 | | CGCCTGCCTCGGCTCGACCCCCGCAG | 182 |
| 13123 | | CGGCTAGAAATCGGCCTGTTCCGGCCTCGCCT | 297 |
| 13174 | | CGGGGGTGGGGATGCGGCGGTGAACCCG | 384 |
| 13175 | | CGCGGCAGGTGAGAGGGGAGCTGCCCCTGCG | 568 |
| 13176 | | CGCGTGCACGTGTGTCCACATGAGTGC | 3656 |
| 13203 | MIF1_1 | CGCCACCGCCGGCGCCAGGCCCCGCC | 117 |
| 13414 | MIF1_2 | CGCGGCAGGTGAGAGGGGAGCTGCCC | 563 |

Target Shift Sequences

| | | Relative |
|---|---|---|
| | | upstream |
| | | location |
| | | to gene |
| Sequence | | start |
| ID No: | Sequence (5′-3′) | site |
| 12470 | GACCCGCGCAGAGGCACAGACGC | 20 |
| 12471 | ACCCGCGCAGAGGCACAGAC | 21 |
| 12472 | CCCGCGCAGAGGCACAGACG | 22 |
| 12473 | CCGCGCAGAGGCACAGACGC | 23 |
| 12474 | CGCGCAGAGGCACAGACGCA | 24 |
| 12475 | GCGCAGAGGCACAGACGCAC | 25 |
| 12476 | CGCAGAGGCACAGACGCACG | 26 |
| 12477 | GCAGAGGCACAGACGCACGC | 27 |
| 12478 | CAGAGGCACAGACGCACGCG | 28 |
| 12479 | AGAGGCACAGACGCACGCGC | 29 |
| 12480 | GAGGCACAGACGCACGCGCC | 30 |
| 12481 | AGGCACAGACGCACGCGCCG | 31 |
| 12482 | GGCACAGACGCACGCGCCGC | 32 |
| 12483 | GCACAGACGCACGCGCCGCG | 33 |
| 12484 | CACAGACGCACGCGCCGCGG | 34 |
| 12485 | ACAGACGCACGCGCCGCGGC | 35 |
| 12486 | CAGACGCACGCGCCGCGGCC | 36 |
| 12487 | AGACCCGCGCAGAGGCACAG | 19 |
| 12488 | GAGACCCGCGCAGAGGCACA | 18 |
| 12489 | GGAGACCCGCGCAGAGGCAC | 17 |
| 12490 | CGCCACCGCCGGCGCCAGGC | 112 |
| | CCCGCCCCCGCG | |
| 12491 | GCCACCGCCGGCGCCAGGCC | 113 |
| 12492 | CCACCGCCGGCGCCAGGCCC | 114 |
| 12493 | CACCGCCGGCGCCAGGCCCC | 115 |
| 12494 | ACCGCCGGCGCCAGGCCCCG | 116 |
| 12495 | CCGCCGGCGCCAGGCCCCGC | 117 |
| 12496 | CGCCGGCGCCAGGCCCCGCC | 118 |
| 12497 | GCCGGCGCCAGGCCCCGCCC | 119 |
| 12498 | CCGGCGCCAGGCCCCGCCCC | 120 |
| 12499 | CGGCGCCAGGCCCCGCCCCC | 121 |
| 12500 | GGCGCCAGGCCCCGCCCCCG | 122 |
| 12501 | GCGCCAGGCCCCGCCCCCGC | 123 |
| 12502 | CGCCAGGCCCCGCCCCCGCG | 124 |
| 12503 | GCCAGGCCCCGCCCCCGCGA | 125 |
| 12504 | CCAGGCCCCGCCCCCGCGAG | 126 |
| 12505 | CAGGCCCCGCCCCCGCGAGG | 127 |
| 12506 | AGGCCCCGCCCCCGCGAGGC | 128 |
| 12507 | GGCCCCGCCCCCGCGAGGCT | 129 |
| 12508 | GCCCCGCCCCCGCGAGGCTG | 130 |
| 12509 | CCCCGCCCCCGCGAGGCTGC | 131 |
| 12510 | CCCGCCCCCGCGAGGCTGCG | 132 |
| 12511 | CCGCCCCCGCGAGGCTGCGG | 133 |
| 12512 | CGCCCCCGCGAGGCTGCGGC | 134 |
| 12513 | GCCCCCGCGAGGCTGCGGCT | 135 |
| 12514 | CCCCCGCGAGGCTGCGGCTC | 136 |
| 12515 | CCCCGCGAGGCTGCGGCTCC | 137 |
| 12516 | CCCGCGAGGCTGCGGCTCCG | 138 |
| 12517 | CCGCGAGGCTGCGGCTCCGC | 139 |
| 12518 | CGCGAGGCTGCGGCTCCGCC | 140 |
| 12519 | GCGAGGCTGCGGCTCCGCCC | 141 |
| 12520 | CGAGGCTGCGGCTCCGCCCC | 142 |
| 12521 | GAGGCTGCGGCTCCGCCCCG | 143 |
| 12522 | AGGCTGCGGCTCCGCCCCGA | 144 |
| 12523 | GGCTGCGGCTCCGCCCCGAG | 145 |
| 12524 | GCTGCGGCTCCGCCCCGAGT | 146 |
| 12525 | CTGCGGCTCCGCCCCGAGTG | 147 |
| 12526 | TGCGGCTCCGCCCCGAGTGG | 148 |
| 12527 | GCGGCTCCGCCCCGAGTGGG | 149 |
| 12528 | CGGCTCCGCCCCGAGTGGGG | 150 |
| 12529 | GGCTCCGCCCCGAGTGGGGA | 151 |
| 12530 | GCTCCGCCCCGAGTGGGGAA | 152 |
| 12531 | CTCCGCCCCGAGTGGGGAAG | 153 |
| 12532 | TCCGCCCCGAGTGGGGAAGT | 154 |
| 12533 | CCGCCCCGAGTGGGGAAGTC | 155 |
| 12534 | CGCCCCGAGTGGGGAAGTCA | 156 |
| 12535 | GCCCCGAGTGGGGAAGTCAC | 157 |
| 12536 | CCCCGAGTGGGGAAGTCACC | 158 |
| 12537 | CCCGAGTGGGGAAGTCACCG | 159 |
| 12538 | CCGAGTGGGGAAGTCACCGC | 160 |
| 12539 | CGAGTGGGGAAGTCACCGCC | 161 |
| 12540 | GAGTGGGGAAGTCACCGCCT | 162 |
| 12541 | AGTGGGGAAGTCACCGCCTG | 163 |
| 12542 | GTGGGGAAGTCACCGCCTGC | 164 |
| 12543 | TGGGGAAGTCACCGCCTGCC | 165 |
| 12544 | GGGGAAGTCACCGCCTGCCT | 166 |
| 12545 | GGGAAGTCACCGCCTGCCTC | 167 |
| 12546 | GGAAGTCACCGCCTGCCTCG | 168 |
| 12547 | GAAGTCACCGCCTGCCTCGG | 169 |
| 12548 | AAGTCACCGCCTGCCTCGGC | 170 |
| 12549 | AGTCACCGCCTGCCTCGGCT | 171 |
| 12550 | GTCACCGCCTGCCTCGGCTC | 172 |
| 12551 | TCACCGCCTGCCTCGGCTCG | 173 |
| 12552 | CACCGCCTGCCTCGGCTCGA | 174 |
| 12553 | ACCGCCTGCCTCGGCTCGAC | 175 |
| 12554 | CCGCCTGCCTCGGCTCGACC | 176 |
| 12555 | CGCCTGCCTCGGCTCGACCC | 177 |
| 12556 | GCCTGCCTCGGCTCGACCCC | 178 |
| 12557 | CCTGCCTCGGCTCGACCCCC | 179 |
| 12558 | CTGCCTCGGCTCGACCCCCG | 180 |
| 12559 | TGCCTCGGCTCGACCCCCGC | 181 |
| 12560 | GCCTCGGCTCGACCCCCGCA | 182 |
| 12561 | CCTCGGCTCGACCCCCGCAG | 183 |
| 12562 | CTCGGCTCGACCCCCGCAGG | 184 |
| 12563 | TCGGCTCGACCCCCGCAGGG | 185 |
| 12564 | CGGCTCGACCCCCGCAGGGC | 186 |
| 12565 | GGCTCGACCCCCGCAGGGCA | 187 |
| 12566 | GCTCGACCCCCGCAGGGCAG | 188 |
| 12567 | CTCGACCCCCGCAGGGCAGG | 189 |
| 12568 | TCGACCCCCGCAGGGCAGGA | 190 |
| 12569 | CGACCCCCGCAGGGCAGGAC | 191 |
| 12570 | GACCCCCGCAGGGCAGGACC | 192 |
| 12571 | ACCCCCGCAGGGCAGGACCC | 193 |
| 12572 | CCCCCGCAGGGCAGGACCCT | 194 |
| 12573 | CCCCGCAGGGCAGGACCCTG | 195 |
| 12574 | CCCGCAGGGCAGGACCCTGG | 196 |
| 12575 | CCGCAGGGCAGGACCCTGGG | 197 |
| 12576 | CGCAGGGCAGGACCCTGGGC | 198 |
| 12577 | GCAGGGCAGGACCCTGGGCG | 199 |
| 12578 | CAGGGCAGGACCCTGGGCGA | 200 |
| 12579 | AGGGCAGGACCCTGGGCGAC | 201 |
| 12580 | GGGCAGGACCCTGGGCGACT | 202 |
| 12581 | GGCAGGACCCTGGGCGACTC | 203 |
| 12582 | GCAGGACCCTGGGCGACTCC | 204 |
| 12583 | CAGGACCCTGGGCGACTCCG | 205 |
| 12584 | AGGACCCTGGGCGACTCCGC | 206 |
| 12585 | GGACCCTGGGCGACTCCGCC | 207 |
| 12586 | GACCCTGGGCGACTCCGCCC | 208 |
| 12587 | ACCCTGGGCGACTCCGCCCG | 209 |
| 12588 | CCCTGGGCGACTCCGCCCGT | 210 |
| 12589 | CCTGGGCGACTCCGCCCGTT | 211 |
| 12590 | CTGGGCGACTCCGCCCGTTC | 212 |
| 12591 | TGGGCGACTCCGCCCGTTCC | 213 |
| 12592 | GGGCGACTCCGCCCGTTCCT | 214 |
| 12593 | GGCGACTCCGCCCGTTCCTC | 215 |
| 12594 | GCGACTCCGCCCGTTCCTCC | 216 |
| 12595 | CGACTCCGCCCGTTCCTCCA | 217 |
| 12596 | GACTCCGCCCGTTCCTCCAG | 218 |
| 12597 | ACTCCGCCCGTTCCTCCAGC | 219 |
| 12598 | CTCCGCCCGTTCCTCCAGCA | 220 |
| 12599 | TCCGCCCGTTCCTCCAGCAA | 221 |
| 12600 | CCGCCCGTTCCTCCAGCAAC | 222 |
| 12601 | CGCCCGTTCCTCCAGCAACC | 223 |
| 12602 | GCCCGTTCCTCCAGCAACCG | 224 |
| 12603 | CCCGTTCCTCCAGCAACCGC | 225 |
| 12604 | CCGTTCCTCCAGCAACCGCC | 226 |
| 12605 | CGTTCCTCCAGCAACCGCCG | 227 |
| 12606 | GTTCCTCCAGCAACCGCCGC | 228 |
| 12607 | TTCCTCCAGCAACCGCCGCT | 229 |
| 12608 | TCCTCCAGCAACCGCCGCTA | 230 |
| 12609 | CCTCCAGCAACCGCCGCTAA | 231 |
| 12610 | CTCCAGCAACCGCCGCTAAG | 232 |
| 12611 | TCCAGCAACCGCCGCTAAGC | 233 |
| 12612 | CCAGCAACCGCCGCTAAGCC | 234 |
| 12613 | CAGCAACCGCCGCTAAGCCC | 235 |
| 12614 | AGCAACCGCCGCTAAGCCCG | 236 |
| 12615 | GCAACCGCCGCTAAGCCCGG | 237 |
| 12616 | CAACCGCCGCTAAGCCCGGC | 238 |
| 12617 | AACCGCCGCTAAGCCCGGCG | 239 |
| 12618 | ACCGCCGCTAAGCCCGGCGC | 240 |
| 12619 | CCGCCGCTAAGCCCGGCGCA | 241 |
| 12620 | CGCCGCTAAGCCCGGCGCAC | 242 |
| 12621 | GCCGCTAAGCCCGGCGCACC | 243 |
| 12622 | CCGCTAAGCCCGGCGCACCG | 244 |
| 12623 | CGCTAAGCCCGGCGCACCGC | 245 |
| 12624 | GCTAAGCCCGGCGCACCGCT | 246 |
| 12625 | CTAAGCCCGGCGCACCGCTC | 247 |
| 12626 | TAAGCCCGGCGCACCGCTCC | 248 |
| 12627 | AAGCCCGGCGCACCGCTCCA | 249 |
| 12628 | AGCCCGGCGCACCGCTCCAA | 250 |
| 12629 | GCCCGGCGCACCGCTCCAAC | 251 |
| 12630 | CCCGGCGCACCGCTCCAACC | 252 |
| 12631 | CCGGCGCACCGCTCCAACCT | 253 |
| 12632 | CGGCGCACCGCTCCAACCTG | 254 |
| 12633 | GGCGCACCGCTCCAACCTGT | 255 |
| 12634 | GCGCACCGCTCCAACCTGTT | 256 |
| 12635 | CGCACCGCTCCAACCTGTTC | 257 |
| 12636 | GCACCGCTCCAACCTGTTCT | 258 |
| 12637 | CACCGCTCCAACCTGTTCTC | 259 |
| 12638 | ACCGCTCCAACCTGTTCTCC | 260 |
| 12639 | CCGCTCCAACCTGTTCTCCA | 261 |
| 12640 | CGCTCCAACCTGTTCTCCAC | 262 |
| 12641 | ACGCCACCGCCGGCGCCAGG | 111 |
| 12642 | GACGCCACCGCCGGCGCCAG | 110 |
| 12643 | TGACGCCACCGCCGGCGCCA | 109 |
| 12644 | GTGACGCCACCGCCGGCGCC | 108 |
| 12645 | TGTGACGCCACCGCCGGCGC | 107 |
| 12646 | TTGTGACGCCACCGCCGGCG | 106 |
| 12647 | TTTGTGACGCCACCGCCGGC | 105 |
| 12648 | TTTTGTGACGCCACCGCCGG | 104 |
| 12649 | CTTTTGTGACGCCACCGCCG | 103 |
| 12650 | CCTTTTGTGACGCCACCGCC | 102 |
| 12651 | GCCTTTTGTGACGCCACCGC | 101 |
| 12652 | CGCCTTTTGTGACGCCACCG | 100 |
| 12653 | CCGCCTTTTGTGACGCCACC | 99 |
| 12654 | CCCGCCTTTTGTGACGCCAC | 98 |
| 12655 | TCCCGCCTTTTGTGACGCCA | 97 |
| 12656 | GTCCCGCCTTTTGTGACGCC | 96 |
| 12657 | GGTCCCGCCTTTTGTGACGC | 95 |
| 12658 | TGGTCCCGCCTTTTGTGACG | 94 |
| 12659 | GTGGTCCCGCCTTTTGTGAC | 93 |
| 12660 | TGTGGTCCCGCCTTTTGTGA | 92 |
| 12661 | CTGTGGTCCCGCCTTTTGTG | 91 |
| 12662 | ACTGTGGTCCCGCCTTTTGT | 90 |
| 12663 | CACTGTGGTCCCGCCTTTTG | 89 |
| 12664 | CCACTGTGGTCCCGCCTTTT | 88 |
| 12665 | ACCACTGTGGTCCCGCCTTT | 87 |
| 12666 | CACCACTGTGGTCCCGCCTT | 86 |
| 12667 | ACACCACTGTGGTCCCGCCT | 85 |
| 12668 | GACACCACTGTGGTCCCGCC | 84 |
| 12669 | GGACACCACTGTGGTCCCGC | 83 |
| 12670 | CGGACACCACTGTGGTCCCG | 82 |
| 12671 | TCGGACACCACTGTGGTCCC | 81 |
| 12672 | CTCGGACACCACTGTGGTCC | 80 |
| 12673 | TCTCGGACACCACTGTGGTC | 79 |
| 12674 | TTCTCGGACACCACTGTGGT | 78 |
| 12675 | CTTCTCGGACACCACTGTGG | 77 |
| 12676 | ACTTCTCGGACACCACTGTG | 76 |
| 12677 | GACTTCTCGGACACCACTGT | 75 |
| 12678 | TGACTTCTCGGACACCACTG | 74 |
| 12679 | CTGACTTCTCGGACACCACT | 73 |
| 12680 | CCTGACTTCTCGGACACCAC | 72 |
| 12681 | GCCTGACTTCTCGGACACCA | 71 |
| 12682 | TGCCTGACTTCTCGGACACC | 70 |
| 12683 | GTGCCTGACTTCTCGGACAC | 69 |
| 12684 | CGTGCCTGACTTCTCGGACA | 68 |
| 12685 | ACGTGCCTGACTTCTCGGAC | 67 |
| 12686 | TACGTGCCTGACTTCTCGGA | 66 |
| 12687 | CTACGTGCCTGACTTCTCGG | 65 |
| 12688 | GCTACGTGCCTGACTTCTCG | 64 |
| 12689 | AGCTACGTGCCTGACTTCTC | 63 |
| 12690 | GAGCTACGTGCCTGACTTCT | 62 |
| 12691 | TGAGCTACGTGCCTGACTTC | 61 |
| 12692 | CTGAGCTACGTGCCTGACTT | 60 |
| 12693 | GCTGAGCTACGTGCCTGACT | 59 |
| 12694 | CGCTGAGCTACGTGCCTGAC | 58 |
| 12695 | CCGCTGAGCTACGTGCCTGA | 57 |
| 12696 | GCCGCTGAGCTACGTGCCTG | 56 |
| 12697 | CGCCGCTGAGCTACGTGCCT | 55 |
| 12698 | CCGCCGCTGAGCTACGTGCC | 54 |
| 12699 | GCCGCCGCTGAGCTACGTGC | 53 |
| 12700 | GGCCGCCGCTGAGCTACGTG | 52 |
| 12701 | CGTTCCTCCAGCAACCGCCGCTAAGCCCGGCG | 227 |
| 12702 | GTTCCTCCAGCAACCGCCGC | 228 |
| 12703 | TTCCTCCAGCAACCGCCGCT | 229 |
| 12704 | TCCTCCAGCAACCGCCGCTA | 230 |
| 12705 | CCTCCAGCAACCGCCGCTAA | 231 |
| 12706 | CTCCAGCAACCGCCGCTAAG | 232 |
| 12707 | TCCAGCAACCGCCGCTAAGC | 233 |
| 12708 | CCAGCAACCGCCGCTAAGCC | 234 |
| 12709 | CAGCAACCGCCGCTAAGCCC | 235 |
| 12710 | AGCAACCGCCGCTAAGCCCG | 236 |
| 12711 | GCAACCGCCGCTAAGCCCGG | 237 |
| 12712 | CAACCGCCGCTAAGCCCGGC | 238 |
| 12713 | AACCGCCGCTAAGCCCGGCG | 239 |
| 12714 | ACCGCCGCTAAGCCCGGCGC | 240 |
| 12715 | CCGCCGCTAAGCCCGGCGCA | 241 |
| 12716 | CGCCGCTAAGCCCGGCGCAC | 242 |
| 12717 | GCCGCTAAGCCCGGCGCACC | 243 |
| 12718 | CCGCTAAGCCCGGCGCACCG | 244 |
| 12719 | CGCTAAGCCCGGCGCACCGC | 245 |
| 12720 | GCTAAGCCCGGCGCACCGCT | 246 |
| 12721 | CTAAGCCCGGCGCACCGCTC | 247 |
| 12722 | TAAGCCCGGCGCACCGCTCC | 248 |
| 12723 | AAGCCCGGCGCACCGCTCCA | 249 |
| 12724 | AGCCCGGCGCACCGCTCCAA | 250 |
| 12725 | GCCCGGCGCACCGCTCCAAC | 251 |
| 12726 | CCCGGCGCACCGCTCCAACC | 252 |
| 12727 | CCGGCGCACCGCTCCAACCT | 253 |
| 12728 | CGGCGCACCGCTCCAACCTG | 254 |
| 12729 | GGCGCACCGCTCCAACCTGT | 255 |
| 12730 | GCGCACCGCTCCAACCTGTT | 256 |
| 12731 | CGCACCGCTCCAACCTGTTC | 257 |
| 12732 | GCACCGCTCCAACCTGTTCT | 258 |
| 12733 | CACCGCTCCAACCTGTTCTC | 259 |
| 12734 | ACCGCTCCAACCTGTTCTCC | 260 |
| 12735 | CCGCTCCAACCTGTTCTCCA | 261 |
| 12736 | CGCTCCAACCTGTTCTCCAC | 262 |
| 12737 | CCGTTCCTCCAGCAACCGCC | 226 |
| 12738 | CCCGTTCCTCCAGCAACCGC | 225 |
| 12739 | GCCCGTTCCTCCAGCAACCG | 224 |
| 12740 | CGCCCGTTCCTCCAGCAACC | 223 |
| 12741 | CCGCCCGTTCCTCCAGCAAC | 222 |
| 12742 | TCCGCCCGTTCCTCCAGCAA | 221 |
| 12743 | CTCCGCCCGTTCCTCCAGCA | 220 |
| 12744 | ACTCCGCCCGTTCCTCCAGC | 219 |
| 12745 | GACTCCGCCCGTTCCTCCAG | 218 |
| 12746 | CGACTCCGCCCGTTCCTCCA | 217 |
| 12747 | GCGACTCCGCCCGTTCCTCC | 216 |
| 12748 | GGCGACTCCGCCCGTTCCTC | 215 |
| 12749 | GGGCGACTCCGCCCGTTCCT | 214 |
| 12750 | TGGGCGACTCCGCCCGTTCC | 213 |
| 12751 | CTGGGCGACTCCGCCCGTTC | 212 |
| 12752 | CCTGGGCGACTCCGCCCGTT | 211 |
| 12753 | CCCTGGGCGACTCCGCCCGT | 210 |
| 12754 | ACCCTGGGCGACTCCGCCCG | 209 |
| 12755 | GACCCTGGGCGACTCCGCCC | 208 |
| 12756 | GGACCCTGGGCGACTCCGCC | 207 |
| 12757 | AGGACCCTGGGCGACTCCGC | 206 |
| 12758 | CAGGACCCTGGGCGACTCCG | 205 |
| 12759 | GCAGGACCCTGGGCGACTCC | 204 |
| 12760 | GGCAGGACCCTGGGCGACTC | 203 |
| 12761 | GGGCAGGACCCTGGGCGACT | 202 |
| 12762 | AGGGCAGGACCCTGGGCGAC | 201 |
| 12763 | CAGGGCAGGACCCTGGGCGA | 200 |
| 12764 | GCAGGGCAGGACCCTGGGCG | 199 |
| 12765 | CGCAGGGCAGGACCCTGGGC | 198 |
| 12766 | CCGCAGGGCAGGACCCTGGG | 197 |
| 12767 | CCCGCAGGGCAGGACCCTGG | 196 |
| 12768 | CCCCGCAGGGCAGGACCCTG | 195 |
| 12769 | CCCCCGCAGGGCAGGACCCT | 194 |
| 12770 | ACCCCCGCAGGGCAGGACCC | 193 |
| 12771 | GACCCCCGCAGGGCAGGACC | 192 |
| 12772 | CGACCCCCGCAGGGCAGGAC | 191 |
| 12773 | TCGACCCCCGCAGGGCAGGA | 190 |
| 12774 | CTCGACCCCCGCAGGGCAGG | 189 |
| 12775 | GCTCGACCCCCGCAGGGCAG | 188 |
| 12776 | GGCTCGACCCCCGCAGGGCA | 187 |
| 12777 | CGGCTCGACCCCCGCAGGGC | 186 |
| 12778 | TCGGCTCGACCCCCGCAGGG | 185 |
| 12779 | CTCGGCTCGACCCCCGCAGG | 184 |
| 12780 | CCTCGGCTCGACCCCCGCAG | 183 |
| 12781 | GCCTCGGCTCGACCCCCGCA | 182 |
| 12782 | TGCCTCGGCTCGACCCCCGC | 181 |
| 12783 | CTGCCTCGGCTCGACCCCCG | 180 |
| 12784 | CCTGCCTCGGCTCGACCCCC | 179 |
| 12785 | GCCTGCCTCGGCTCGACCCC | 178 |
| 12786 | CGCCTGCCTCGGCTCGACCC | 177 |
| 12787 | CCGCCTGCCTCGGCTCGACC | 176 |
| 12788 | ACCGCCTGCCTCGGCTCGAC | 175 |
| 12789 | CACCGCCTGCCTCGGCTCGA | 174 |
| 12790 | TCACCGCCTGCCTCGGCTCG | 173 |
| 12791 | GTCACCGCCTGCCTCGGCTC | 172 |
| 12792 | AGTCACCGCCTGCCTCGGCT | 171 |
| 12793 | AAGTCACCGCCTGCCTCGGC | 170 |
| 12794 | GAAGTCACCGCCTGCCTCGG | 169 |
| 12795 | GGAAGTCACCGCCTGCCTCG | 168 |
| 12796 | GGGAAGTCACCGCCTGCCTC | 167 |
| 12797 | GGGGAAGTCACCGCCTGCCT | 166 |
| 12798 | TGGGGAAGTCACCGCCTGCC | 165 |
| 12799 | GTGGGGAAGTCACCGCCTGC | 164 |
| 12800 | AGTGGGGAAGTCACCGCCTG | 163 |
| 12801 | GAGTGGGGAAGTCACCGCCT | 162 |
| 12802 | CGAGTGGGGAAGTCACCGCC | 161 |
| 12803 | CCGAGTGGGGAAGTCACCGC | 160 |
| 12804 | CCCGAGTGGGGAAGTCACCG | 159 |
| 12805 | CCCCGAGTGGGGAAGTCACC | 158 |
| 12806 | GCCCCGAGTGGGGAAGTCAC | 157 |
| 12807 | CGCCCCGAGTGGGGAAGTCA | 156 |
| 12808 | CCGCCCCGAGTGGGGAAGTC | 155 |
| 12809 | TCCGCCCCGAGTGGGGAAGT | 154 |
| 12810 | CTCCGCCCCGAGTGGGGAAG | 153 |
| 12811 | GCTCCGCCCCGAGTGGGGAA | 152 |
| 12812 | GGCTCCGCCCCGAGTGGGGA | 151 |
| 12813 | CGGCTCCGCCCCGAGTGGGG | 150 |
| 12814 | GCGGCTCCGCCCCGAGTGGG | 149 |
| 12815 | TGCGGCTCCGCCCCGAGTGG | 148 |
| 12816 | CTGCGGCTCCGCCCCGAGTG | 147 |
| 12817 | GCTGCGGCTCCGCCCCGAGT | 146 |
| 12818 | GGCTGCGGCTCCGCCCCGAG | 145 |
| 12819 | AGGCTGCGGCTCCGCCCCGA | 144 |
| 12820 | GAGGCTGCGGCTCCGCCCCG | 143 |
| 12821 | CGAGGCTGCGGCTCCGCCCC | 142 |
| 12822 | GCGAGGCTGCGGCTCCGCCC | 141 |
| 12823 | CGCGAGGCTGCGGCTCCGCC | 140 |
| 12824 | CCGCGAGGCTGCGGCTCCGC | 139 |
| 12825 | CCCGCGAGGCTGCGGCTCCG | 138 |
| 12826 | CCCCGCGAGGCTGCGGCTCC | 137 |
| 12827 | CCCCCGCGAGGCTGCGGCTC | 136 |
| 12828 | GCCCCCGCGAGGCTGCGGCT | 135 |
| 12829 | CGCCCCCGCGAGGCTGCGGC | 134 |
| 12830 | CCGCCCCCGCGAGGCTGCGG | 133 |
| 12831 | CCCGCCCCCGCGAGGCTGCG | 132 |
| 12832 | CCCCGCCCCCGCGAGGCTGC | 131 |
| 12833 | GCCCCGCCCCCGCGAGGCTG | 130 |
| 12834 | GGCCCCGCCCCCGCGAGGCT | 129 |
| 12835 | AGGCCCCGCCCCCGCGAGGC | 128 |
| 12836 | CAGGCCCCGCCCCCGCGAGG | 127 |
| 12837 | CCAGGCCCCGCCCCCGCGAG | 126 |
| 12838 | GCCAGGCCCCGCCCCCGCGA | 125 |
| 12839 | CGCCAGGCCCCGCCCCCGCG | 124 |
| 12840 | GCGCCAGGCCCCGCCCCCGC | 123 |
| 12841 | GGCGCCAGGCCCCGCCCCCG | 122 |
| 12842 | CGGCGCCAGGCCCCGCCCCC | 121 |
| 12843 | CCGGCGCCAGGCCCCGCCCC | 120 |
| 12844 | GCCGGCGCCAGGCCCCGCCC | 119 |
| 12845 | CGCCGGCGCCAGGCCCCGCC | 118 |
| 12846 | CCGCCGGCGCCAGGCCCCGC | 117 |
| 12847 | ACCGCCGGCGCCAGGCCCCG | 116 |
| 12848 | CACCGCCGGCGCCAGGCCCC | 115 |
| 12849 | CCACCGCCGGCGCCAGGCCC | 114 |
| 12850 | GCCACCGCCGGCGCCAGGCC | 113 |
| 12851 | CGCCACCGCCGGCGCCAGGC | 112 |
| 12852 | ACGCCACCGCCGGCGCCAGG | 111 |
| 12853 | GACGCCACCGCCGGCGCCAG | 110 |
| 12854 | TGACGCCACCGCCGGCGCCA | 109 |
| 12855 | GTGACGCCACCGCCGGCGCC | 108 |
| 12856 | TGTGACGCCACCGCCGGCGC | 107 |
| 12857 | TTGTGACGCCACCGCCGGCG | 106 |
| 12858 | TTTGTGACGCCACCGCCGGC | 105 |
| 12859 | TTTTGTGACGCCACCGCCGG | 104 |
| 12860 | CTTTTGTGACGCCACCGCCG | 103 |
| 12861 | CCTTTTGTGACGCCACCGCC | 102 |
| 12862 | GCCTTTTGTGACGCCACCGC | 101 |
| 12863 | CGCCTTTTGTGACGCCACCG | 100 |
| 12864 | CCGCCTTTTGTGACGCCACC | 99 |
| 12865 | CCCGCCTTTTGTGACGCCAC | 98 |
| 12866 | TCCCGCCTTTTGTGACGCCA | 97 |
| 12867 | GTCCCGCCTTTTGTGACGCC | 96 |
| 12868 | GGTCCCGCCTTTTGTGACGC | 95 |
| 12869 | TGGTCCCGCCTTTTGTGACG | 94 |
| 12870 | GTGGTCCCGCCTTTTGTGAC | 93 |
| 12871 | TGTGGTCCCGCCTTTTGTGA | 92 |
| 12872 | CTGTGGTCCCGCCTTTTGTG | 91 |
| 12873 | ACTGTGGTCCCGCCTTTTGT | 90 |
| 12874 | CACTGTGGTCCCGCCTTTTG | 89 |
| 12875 | CCACTGTGGTCCCGCCTTTT | 88 |
| 12876 | ACCACTGTGGTCCCGCCTTT | 87 |
| 12877 | CACCACTGTGGTCCCGCCTT | 86 |
| 12878 | ACACCACTGTGGTCCCGCCT | 85 |
| 12879 | GACACCACTGTGGTCCCGCC | 84 |
| 12880 | GGACACCACTGTGGTCCCGC | 83 |
| 12881 | CGGACACCACTGTGGTCCCG | 82 |
| 12882 | TCGGACACCACTGTGGTCCC | 81 |
| 12883 | CTCGGACACCACTGTGGTCC | 80 |
| 12884 | TCTCGGACACCACTGTGGTC | 79 |
| 12885 | TTCTCGGACACCACTGTGGT | 78 |
| 12886 | CTTCTCGGACACCACTGTGG | 77 |
| 12887 | ACTTCTCGGACACCACTGTG | 76 |
| 12888 | GACTTCTCGGACACCACTGT | 75 |
| 12889 | TGACTTCTCGGACACCACTG | 74 |
| 12890 | CTGACTTCTCGGACACCACT | 73 |
| 12891 | CCTGACTTCTCGGACACCAC | 72 |
| 12892 | GCCTGACTTCTCGGACACCA | 71 |
| 12893 | TGCCTGACTTCTCGGACACC | 70 |
| 12894 | GTGCCTGACTTCTCGGACAC | 69 |
| 12895 | CGTGCCTGACTTCTCGGACA | 68 |
| 12896 | ACGTGCCTGACTTCTCGGAC | 67 |
| 12897 | TACGTGCCTGACTTCTCGGA | 66 |
| 12898 | CTACGTGCCTGACTTCTCGG | 65 |
| 12899 | GCTACGTGCCTGACTTCTCG | 64 |
| 12900 | AGCTACGTGCCTGACTTCTC | 63 |
| 12901 | GAGCTACGTGCCTGACTTCT | 62 |
| 12902 | TGAGCTACGTGCCTGACTTC | 61 |
| 12903 | CTGAGCTACGTGCCTGACTT | 60 |
| 12904 | GCTGAGCTACGTGCCTGACT | 59 |
| 12905 | CGCTGAGCTACGTGCCTGAC | 58 |
| 12906 | CCGCTGAGCTACGTGCCTGA | 57 |
| 12907 | GCCGCTGAGCTACGTGCCTG | 56 |
| 12908 | CGCCGCTGAGCTACGTGCCT | 55 |
| 12909 | CCGCCGCTGAGCTACGTGCC | 54 |
| 12910 | GCCGCCGCTGAGCTACGTGC | 53 |
| 12911 | GGCCGCCGCTGAGCTACGTG | 52 |
| 12912 | CGCCTGCCTCGGCTCGACCCCCGCAG | 177 |
| 12913 | GCCTGCCTCGGCTCGACCCC | 178 |
| 12914 | CCTGCCTCGGCTCGACCCCC | 179 |
| 12915 | CTGCCTCGGCTCGACCCCCG | 180 |
| 12916 | TGCCTCGGCTCGACCCCCGC | 181 |
| 12917 | GCCTCGGCTCGACCCCCGCA | 182 |
| 12918 | CCTCGGCTCGACCCCCGCAG | 183 |
| 12919 | CTCGGCTCGACCCCCGCAGG | 184 |
| 12920 | TCGGCTCGACCCCCGCAGGG | 185 |
| 12921 | CGGCTCGACCCCCGCAGGGC | 186 |
| 12922 | GGCTCGACCCCCGCAGGGCA | 187 |
| 12923 | GCTCGACCCCCGCAGGGCAG | 188 |
| 12924 | CTCGACCCCCGCAGGGCAGG | 189 |
| 12925 | TCGACCCCCGCAGGGCAGGA | 190 |
| 12926 | CGACCCCCGCAGGGCAGGAC | 191 |
| 12927 | GACCCCCGCAGGGCAGGACC | 192 |
| 12928 | ACCCCCGCAGGGCAGGACCC | 193 |
| 12929 | CCCCCGCAGGGCAGGACCCT | 194 |
| 12930 | CCCCGCAGGGCAGGACCCTG | 195 |
| 12931 | CCCGCAGGGCAGGACCCTGG | 196 |
| 12932 | CCGCAGGGCAGGACCCTGGG | 197 |
| 12933 | CGCAGGGCAGGACCCTGGGC | 198 |
| 12934 | GCAGGGCAGGACCCTGGGCG | 199 |
| 12935 | CAGGGCAGGACCCTGGGCGA | 200 |
| 12936 | AGGGCAGGACCCTGGGCGAC | 201 |
| 12937 | GGGCAGGACCCTGGGCGACT | 202 |
| 12938 | GGCAGGACCCTGGGCGACTC | 203 |
| 12939 | GCAGGACCCTGGGCGACTCC | 204 |
| 12940 | CAGGACCCTGGGCGACTCCG | 205 |
| 12941 | AGGACCCTGGGCGACTCCGC | 206 |
| 12942 | GGACCCTGGGCGACTCCGCC | 207 |
| 12943 | GACCCTGGGCGACTCCGCCC | 208 |
| 12944 | ACCCTGGGCGACTCCGCCCG | 209 |
| 12945 | CCCTGGGCGACTCCGCCCGT | 210 |
| 12946 | CCTGGGCGACTCCGCCCGTT | 211 |
| 12947 | CTGGGCGACTCCGCCCGTTC | 212 |
| 12948 | TGGGCGACTCCGCCCGTTCC | 213 |
| 12949 | GGGCGACTCCGCCCGTTCCT | 214 |
| 12950 | GGCGACTCCGCCCGTTCCTC | 215 |
| 12951 | GCGACTCCGCCCGTTCCTCC | 216 |
| 12952 | CGACTCCGCCCGTTCCTCCA | 217 |
| 12953 | GACTCCGCCCGTTCCTCCAG | 218 |
| 12954 | ACTCCGCCCGTTCCTCCAGC | 219 |
| 12955 | CTCCGCCCGTTCCTCCAGCA | 220 |
| 12956 | TCCGCCCGTTCCTCCAGCAA | 221 |
| 12957 | CCGCCCGTTCCTCCAGCAAC | 222 |
| 12958 | CGCCCGTTCCTCCAGCAACC | 223 |
| 12959 | GCCCGTTCCTCCAGCAACCG | 224 |
| 12960 | CCCGTTCCTCCAGCAACCGC | 225 |
| 12961 | CCGTTCCTCCAGCAACCGCC | 226 |
| 12962 | CGTTCCTCCAGCAACCGCCG | 227 |
| 12963 | GTTCCTCCAGCAACCGCCGC | 228 |
| 12964 | TTCCTCCAGCAACCGCCGCT | 229 |
| 12965 | TCCTCCAGCAACCGCCGCTA | 230 |
| 12966 | CCTCCAGCAACCGCCGCTAA | 231 |
| 12967 | CTCCAGCAACCGCCGCTAAG | 232 |
| 12968 | TCCAGCAACCGCCGCTAAGC | 233 |
| 12969 | CCAGCAACCGCCGCTAAGCC | 234 |
| 12970 | CAGCAACCGCCGCTAAGCCC | 235 |
| 12971 | AGCAACCGCCGCTAAGCCCG | 236 |
| 12972 | GCAACCGCCGCTAAGCCCGG | 237 |
| 12973 | CAACCGCCGCTAAGCCCGGC | 238 |
| 12974 | AACCGCCGCTAAGCCCGGCG | 239 |
| 12975 | ACCGCCGCTAAGCCCGGCGC | 240 |
| 12976 | CCGCCGCTAAGCCCGGCGCA | 241 |
| 12977 | CGCCGCTAAGCCCGGCGCAC | 242 |
| 12978 | GCCGCTAAGCCCGGCGCACC | 243 |
| 12979 | CCGCTAAGCCCGGCGCACCG | 244 |
| 12980 | CGCTAAGCCCGGCGCACCGC | 245 |
| 12981 | GCTAAGCCCGGCGCACCGCT | 246 |
| 12982 | CTAAGCCCGGCGCACCGCTC | 247 |
| 12983 | TAAGCCCGGCGCACCGCTCC | 248 |
| 12984 | AAGCCCGGCGCACCGCTCCA | 249 |
| 12985 | AGCCCGGCGCACCGCTCCAA | 250 |
| 12986 | GCCCGGCGCACCGCTCCAAC | 251 |
| 12987 | CCCGGCGCACCGCTCCAACC | 252 |
| 12988 | CCGGCGCACCGCTCCAACCT | 253 |
| 12989 | CGGCGCACCGCTCCAACCTG | 254 |
| 12990 | GGCGCACCGCTCCAACCTGT | 255 |
| 12991 | GCGCACCGCTCCAACCTGTT | 256 |
| 12992 | CGCACCGCTCCAACCTGTTC | 257 |
| 12993 | GCACCGCTCCAACCTGTTCT | 258 |
| 12994 | CACCGCTCCAACCTGTTCTC | 259 |
| 12995 | ACCGCTCCAACCTGTTCTCC | 260 |
| 12996 | CCGCTCCAACCTGTTCTCCA | 261 |
| 12997 | CGCTCCAACCTGTTCTCCAC | 262 |
| 12998 | CCGCCTGCCTCGGCTCGACC | 176 |
| 12999 | ACCGCCTGCCTCGGCTCGAC | 175 |
| 13000 | CACCGCCTGCCTCGGCTCGA | 174 |
| 13001 | TCACCGCCTGCCTCGGCTCG | 173 |
| 13002 | GTCACCGCCTGCCTCGGCTC | 172 |
| 13003 | AGTCACCGCCTGCCTCGGCT | 171 |
| 13004 | AAGTCACCGCCTGCCTCGGC | 170 |
| 13005 | GAAGTCACCGCCTGCCTCGG | 169 |
| 13006 | GGAAGTCACCGCCTGCCTCG | 168 |
| 13007 | GGGAAGTCACCGCCTGCCTC | 167 |
| 13008 | GGGGAAGTCACCGCCTGCCT | 166 |
| 13009 | TGGGGAAGTCACCGCCTGCC | 165 |
| 13010 | GTGGGGAAGTCACCGCCTGC | 164 |
| 13011 | AGTGGGGAAGTCACCGCCTG | 163 |
| 13012 | GAGTGGGGAAGTCACCGCCT | 162 |
| 13013 | CGAGTGGGGAAGTCACCGCC | 161 |
| 13014 | CCGAGTGGGGAAGTCACCGC | 160 |
| 13015 | CCCGAGTGGGGAAGTCACCG | 159 |
| 13016 | CCCCGAGTGGGGAAGTCACC | 158 |
| 13017 | GCCCCGAGTGGGGAAGTCAC | 157 |
| 13018 | CGCCCCGAGTGGGGAAGTCA | 156 |
| 13019 | CCGCCCCGAGTGGGGAAGTC | 155 |
| 13020 | TCCGCCCCGAGTGGGGAAGT | 154 |
| 13021 | CTCCGCCCCGAGTGGGGAAG | 153 |
| 13022 | GCTCCGCCCCGAGTGGGGAA | 152 |
| 13023 | GGCTCCGCCCCGAGTGGGGA | 151 |
| 13024 | CGGCTCCGCCCCGAGTGGGG | 150 |
| 13025 | GCGGCTCCGCCCCGAGTGGG | 149 |
| 13026 | TGCGGCTCCGCCCCGAGTGG | 148 |
| 13027 | CTGCGGCTCCGCCCCGAGTG | 147 |
| 13028 | GCTGCGGCTCCGCCCCGAGT | 146 |
| 13029 | GGCTGCGGCTCCGCCCCGAG | 145 |
| 13030 | AGGCTGCGGCTCCGCCCCGA | 144 |
| 13031 | GAGGCTGCGGCTCCGCCCCG | 143 |
| 13032 | CGAGGCTGCGGCTCCGCCCC | 142 |
| 13033 | GCGAGGCTGCGGCTCCGCCC | 141 |
| 13034 | CGCGAGGCTGCGGCTCCGCC | 140 |
| 13035 | CCGCGAGGCTGCGGCTCCGC | 139 |
| 13036 | CCCGCGAGGCTGCGGCTCCG | 138 |
| 13037 | CCCCGCGAGGCTGCGGCTCC | 137 |
| 13038 | CCCCCGCGAGGCTGCGGCTC | 136 |
| 13039 | GCCCCCGCGAGGCTGCGGCT | 135 |
| 13040 | CGCCCCCGCGAGGCTGCGGC | 134 |
| 13041 | CCGCCCCCGCGAGGCTGCGG | 133 |
| 13042 | CCCGCCCCCGCGAGGCTGCG | 132 |
| 13043 | CCCCGCCCCCGCGAGGCTGC | 131 |
| 13044 | GCCCCGCCCCCGCGAGGCTG | 130 |
| 13045 | GGCCCCGCCCCCGCGAGGCT | 129 |
| 13046 | AGGCCCCGCCCCCGCGAGGC | 128 |
| 13047 | CAGGCCCCGCCCCCGCGAGG | 127 |
| 13048 | CCAGGCCCCGCCCCCGCGAG | 126 |
| 13049 | GCCAGGCCCCGCCCCCGCGA | 125 |
| 13050 | CGCCAGGCCCCGCCCCCGCG | 124 |
| 13051 | GCGCCAGGCCCCGCCCCCGC | 123 |
| 13052 | GGCGCCAGGCCCCGCCCCCG | 122 |
| 13053 | CGGCGCCAGGCCCCGCCCCC | 121 |
| 13054 | CCGGCGCCAGGCCCCGCCCC | 120 |
| 13055 | GCCGGCGCCAGGCCCCGCCC | 119 |
| 13056 | CGCCGGCGCCAGGCCCCGCC | 118 |
| 13057 | CCGCCGGCGCCAGGCCCCGC | 117 |
| 13058 | ACCGCCGGCGCCAGGCCCCG | 116 |
| 13059 | CACCGCCGGCGCCAGGCCCC | 115 |
| 13060 | CCACCGCCGGCGCCAGGCCC | 114 |
| 13061 | GCCACCGCCGGCGCCAGGCC | 113 |
| 13062 | CGCCACCGCCGGCGCCAGGC | 112 |
| 13063 | ACGCCACCGCCGGCGCCAGG | 111 |
| 13064 | GACGCCACCGCCGGCGCCAG | 110 |
| 13065 | TGACGCCACCGCCGGCGCCA | 109 |
| 13066 | GTGACGCCACCGCCGGCGCC | 108 |
| 13067 | TGTGACGCCACCGCCGGCGC | 107 |
| 13068 | TTGTGACGCCACCGCCGGCG | 106 |
| 13069 | TTTGTGACGCCACCGCCGGC | 105 |
| 13070 | TTTTGTGACGCCACCGCCGG | 104 |
| 13071 | CTTTTGTGACGCCACCGCCG | 103 |
| 13072 | CCTTTTGTGACGCCACCGCC | 102 |
| 13073 | GCCTTTTGTGACGCCACCGC | 101 |
| 13074 | CGCCTTTTGTGACGCCACCG | 100 |
| 13075 | CCGCCTTTTGTGACGCCACC | 99 |
| 13076 | CCCGCCTTTTGTGACGCCAC | 98 |
| 13077 | TCCCGCCTTTTGTGACGCCA | 97 |
| 13078 | GTCCCGCCTTTTGTGACGCC | 96 |
| 13079 | GGTCCCGCCTTTTGTGACGC | 95 |
| 13080 | TGGTCCCGCCTTTTGTGACG | 94 |
| 13081 | GTGGTCCCGCCTTTTGTGAC | 93 |
| 13082 | TGTGGTCCCGCCTTTTGTGA | 92 |
| 13083 | CTGTGGTCCCGCCTTTTGTG | 91 |
| 13084 | ACTGTGGTCCCGCCTTTTGT | 90 |
| 13085 | CACTGTGGTCCCGCCTTTTG | 89 |
| 13086 | CCACTGTGGTCCCGCCTTTT | 88 |
| 13087 | ACCACTGTGGTCCCGCCTTT | 87 |
| 13088 | CACCACTGTGGTCCCGCCTT | 86 |
| 13089 | ACACCACTGTGGTCCCGCCT | 85 |
| 13090 | GACACCACTGTGGTCCCGCC | 84 |
| 13091 | GGACACCACTGTGGTCCCGC | 83 |
| 13092 | CGGACACCACTGTGGTCCCG | 82 |
| 13093 | TCGGACACCACTGTGGTCCC | 81 |
| 13094 | CTCGGACACCACTGTGGTCC | 80 |
| 13095 | TCTCGGACACCACTGTGGTC | 79 |
| 13096 | TTCTCGGACACCACTGTGGT | 78 |
| 13097 | CTTCTCGGACACCACTGTGG | 77 |
| 13098 | ACTTCTCGGACACCACTGTG | 76 |
| 13099 | GACTTCTCGGACACCACTGT | 75 |
| 13100 | TGACTTCTCGGACACCACTG | 74 |
| 13101 | CTGACTTCTCGGACACCACT | 73 |
| 13102 | CCTGACTTCTCGGACACCAC | 72 |
| 13103 | GCCTGACTTCTCGGACACCA | 71 |
| 13104 | TGCCTGACTTCTCGGACACC | 70 |
| 13105 | GTGCCTGACTTCTCGGACAC | 69 |
| 13106 | CGTGCCTGACTTCTCGGACA | 68 |
| 13107 | ACGTGCCTGACTTCTCGGAC | 67 |
| 13108 | TACGTGCCTGACTTCTCGGA | 66 |
| 13109 | CTACGTGCCTGACTTCTCGG | 65 |
| 13110 | GCTACGTGCCTGACTTCTCG | 64 |
| 13111 | AGCTACGTGCCTGACTTCTC | 63 |
| 13112 | GAGCTACGTGCCTGACTTCT | 62 |
| 13113 | TGAGCTACGTGCCTGACTTC | 61 |
| 13114 | CTGAGCTACGTGCCTGACTT | 60 |
| 13115 | GCTGAGCTACGTGCCTGACT | 59 |
| 13116 | CGCTGAGCTACGTGCCTGAC | 58 |
| 13117 | CCGCTGAGCTACGTGCCTGA | 57 |
| 13118 | GCCGCTGAGCTACGTGCCTG | 56 |
| 13119 | CGCCGCTGAGCTACGTGCCT | 55 |
| 13120 | CCGCCGCTGAGCTACGTGCC | 54 |
| 13121 | GCCGCCGCTGAGCTACGTGC | 53 |
| 13122 | GGCCGCCGCTGAGCTACGTG | 52 |
| 13123 | CGGCTAGAAATCGGCCTGTTCCGGCCTCGCCT | 286 |
| 13124 | GGCTAGAAATCGGCCTGTTC | 287 |
| 13125 | GCTAGAAATCGGCCTGTTCC | 288 |
| 13126 | CTAGAAATCGGCCTGTTCCG | 289 |
| 13127 | TAGAAATCGGCCTGTTCCGG | 290 |
| 13128 | AGAAATCGGCCTGTTCCGGC | 291 |
| 13129 | GAAATCGGCCTGTTCCGGCC | 292 |
| 13130 | AAATCGGCCTGTTCCGGCCT | 293 |
| 13131 | AATCGGCCTGTTCCGGCCTC | 294 |
| 13132 | ATCGGCCTGTTCCGGCCTCG | 295 |
| 13133 | TCGGCCTGTTCCGGCCTCGC | 296 |
| 13134 | CGGCCTGTTCCGGCCTCGCC | 297 |
| 13135 | GGCCTGTTCCGGCCTCGCCT | 298 |
| 13136 | GCCTGTTCCGGCCTCGCCTC | 299 |
| 13137 | CCTGTTCCGGCCTCGCCTCG | 300 |
| 13138 | CTGTTCCGGCCTCGCCTCGG | 301 |
| 13139 | TGTTCCGGCCTCGCCTCGGG | 302 |
| 13140 | GTTCCGGCCTCGCCTCGGGT | 303 |
| 13141 | TTCCGGCCTCGCCTCGGGTC | 304 |
| 13142 | TCCGGCCTCGCCTCGGGTCT | 305 |
| 13143 | CCGGCCTCGCCTCGGGTCTT | 306 |
| 13144 | CGGCCTCGCCTCGGGTCTTT | 307 |
| 13145 | GGCCTCGCCTCGGGTCTTTC | 308 |
| 13146 | GCCTCGCCTCGGGTCTTTCT | 309 |
| 13147 | CCTCGCCTCGGGTCTTTCTT | 310 |
| 13148 | CTCGCCTCGGGTCTTTCTTA | 311 |
| 13149 | TCGCCTCGGGTCTTTCTTAG | 312 |
| 13150 | CGCCTCGGGTCTTTCTTAGT | 313 |
| 13151 | GCCTCGGGTCTTTCTTAGTC | 314 |
| 13152 | CCTCGGGTCTTTCTTAGTCC | 315 |
| 13153 | CTCGGGTCTTTCTTAGTCCT | 316 |
| 13154 | TCGGGTCTTTCTTAGTCCTT | 317 |
| 13155 | CGGGTCTTTCTTAGTCCTTT | 318 |
| 13156 | GCGGCTAGAAATCGGCCTGT | 285 |
| 13157 | GGCGGCTAGAAATCGGCCTG | 284 |
| 13158 | TGGCGGCTAGAAATCGGCCT | 283 |
| 13159 | TTGGCGGCTAGAAATCGGCC | 282 |
| 13160 | CTTGGCGGCTAGAAATCGGC | 281 |
| 13161 | ACTTGGCGGCTAGAAATCGG | 280 |
| 13162 | CACTTGGCGGCTAGAAATCG | 279 |
| 13163 | CCACTTGGCGGCTAGAAATC | 278 |
| 13164 | TCCACTTGGCGGCTAGAAAT | 277 |
| 13165 | CTCCACTTGGCGGCTAGAAA | 276 |
| 13166 | TCTCCACTTGGCGGCTAGAA | 275 |
| 13167 | TTCTCCACTTGGCGGCTAGA | 274 |
| 13168 | GTTCTCCACTTGGCGGCTAG | 273 |
| 13169 | TGTTCTCCACTTGGCGGCTA | 272 |
| 13170 | CTGTTCTCCACTTGGCGGCT | 271 |
| 13171 | CCTGTTCTCCACTTGGCGGC | 270 |
| 13172 | ACCTGTTCTCCACTTGGCGG | 269 |
| 13173 | AACCTGTTCTCCACTTGGCG | 268 |
| 13174 | CGGGGGTGGGGATGCGGCGGTGAACCCG | 377 |
| 13175 | CGCGGCAGGTGAGAGGGGAGCTGCCCCTGCG | 558 |
| 13176 | CGCGTGCACGTGTGTCCACATGAGTGC | 3650 |
| 13177 | GCGTGCACGTGTGTCCACAT | 3651 |
| 13178 | CGTGCACGTGTGTCCACATG | 3652 |
| 13179 | GTGCACGTGTGTCCACATGA | 3653 |
| 13180 | TGCACGTGTGTCCACATGAG | 3654 |
| 13181 | GCACGTGTGTCCACATGAGT | 3655 |
| 13182 | CACGTGTGTCCACATGAGTG | 3656 |
| 13183 | ACGTGTGTCCACATGAGTGC | 3657 |
| 13184 | CGTGTGTCCACATGAGTGCT | 3658 |
| 13185 | GCGCGTGCACGTGTGTCCAC | 3649 |
| 13186 | TGCGCGTGCACGTGTGTCCA | 3648 |
| 13187 | GTGCGCGTGCACGTGTGTCC | 3647 |
| 13188 | TGTGCGCGTGCACGTGTGTC | 3646 |
| 13189 | GTGTGCGCGTGCACGTGTGT | 3645 |
| 13190 | TGTGTGCGCGTGCACGTGTG | 3644 |
| 13191 | GTGTGTGCGCGTGCACGTGT | 3643 |
| 13192 | TGTGTGTGCGCGTGCACGTG | 3642 |
| 13193 | ATGTGTGTGCGCGTGCACGT | 3641 |
| 13194 | CATGTGTGTGCGCGTGCACG | 3640 |
| 13195 | CCATGTGTGTGCGCGTGCAC | 3639 |
| 13196 | TCCATGTGTGTGCGCGTGCA | 3638 |
| 13197 | GTCCATGTGTGTGCGCGTGC | 3637 |
| 13198 | TGTCCATGTGTGTGCGCGTG | 3636 |
| 13199 | GTGTCCATGTGTGTGCGCGT | 3635 |
| 13200 | TGTGTCCATGTGTGTGCGCG | 3634 |
| 13201 | GTGTGTCCATGTGTGTGCGC | 3633 |
| 13202 | TGTGTGTCCATGTGTGTGCG | 3632 |
| 13203 | CGCCACCGCCGGCGCCAGGCCCCGCC | 112 |
| 13204 | GCCACCGCCGGCGCCAGGCC | 113 |
| 13205 | CCACCGCCGGCGCCAGGCCC | 114 |
| 13206 | CACCGCCGGCGCCAGGCCCC | 115 |
| 13207 | ACCGCCGGCGCCAGGCCCCG | 116 |
| 13208 | CCGCCGGCGCCAGGCCCCGC | 117 |
| 13209 | CGCCGGCGCCAGGCCCCGCC | 118 |
| 13210 | GCCGGCGCCAGGCCCCGCCC | 119 |
| 13211 | CCGGCGCCAGGCCCCGCCCC | 120 |
| 13212 | CGGCGCCAGGCCCCGCCCCC | 121 |
| 13213 | GGCGCCAGGCCCCGCCCCCG | 122 |
| 13214 | GCGCCAGGCCCCGCCCCCGC | 123 |
| 13215 | CGCCAGGCCCCGCCCCCGCG | 124 |
| 13216 | GCCAGGCCCCGCCCCCGCGA | 125 |
| 13217 | CCAGGCCCCGCCCCCGCGAG | 126 |
| 13218 | CAGGCCCCGCCCCCGCGAGG | 127 |
| 13219 | AGGCCCCGCCCCCGCGAGGC | 128 |
| 13220 | GGCCCCGCCCCCGCGAGGCT | 129 |
| 13221 | GCCCCGCCCCCGCGAGGCTG | 130 |
| 13222 | CCCCGCCCCCGCGAGGCTGC | 131 |
| 13223 | CCCGCCCCCGCGAGGCTGCG | 132 |
| 13224 | CCGCCCCCGCGAGGCTGCGG | 133 |
| 13225 | CGCCCCCGCGAGGCTGCGGC | 134 |
| 13226 | GCCCCCGCGAGGCTGCGGCT | 135 |
| 13227 | CCCCCGCGAGGCTGCGGCTC | 136 |
| 13228 | CCCCGCGAGGCTGCGGCTCC | 137 |
| 13229 | CCCGCGAGGCTGCGGCTCCG | 138 |
| 13230 | CCGCGAGGCTGCGGCTCCGC | 139 |
| 13231 | CGCGAGGCTGCGGCTCCGCC | 140 |
| 13232 | GCGAGGCTGCGGCTCCGCCC | 141 |
| 13233 | CGAGGCTGCGGCTCCGCCCC | 142 |
| 13234 | GAGGCTGCGGCTCCGCCCCG | 143 |
| 13235 | AGGCTGCGGCTCCGCCCCGA | 144 |
| 13236 | GGCTGCGGCTCCGCCCCGAG | 145 |
| 13237 | GCTGCGGCTCCGCCCCGAGT | 146 |
| 13238 | CTGCGGCTCCGCCCCGAGTG | 147 |
| 13239 | TGCGGCTCCGCCCCGAGTGG | 148 |
| 13240 | GCGGCTCCGCCCCGAGTGGG | 149 |
| 13241 | CGGCTCCGCCCCGAGTGGGG | 150 |
| 13242 | GGCTCCGCCCCGAGTGGGGA | 151 |
| 13243 | GCTCCGCCCCGAGTGGGGAA | 152 |
| 13244 | CTCCGCCCCGAGTGGGGAAG | 153 |
| 13245 | TCCGCCCCGAGTGGGGAAGT | 154 |
| 13246 | CCGCCCCGAGTGGGGAAGTC | 155 |
| 13247 | CGCCCCGAGTGGGGAAGTCA | 156 |
| 13248 | GCCCCGAGTGGGGAAGTCAC | 157 |
| 13249 | CCCCGAGTGGGGAAGTCACC | 158 |
| 13250 | CCCGAGTGGGGAAGTCACCG | 159 |
| 13251 | CCGAGTGGGGAAGTCACCGC | 160 |
| 13252 | CGAGTGGGGAAGTCACCGCC | 161 |
| 13253 | GAGTGGGGAAGTCACCGCCT | 162 |
| 13254 | AGTGGGGAAGTCACCGCCTG | 163 |
| 13255 | GTGGGGAAGTCACCGCCTGC | 164 |
| 13256 | TGGGGAAGTCACCGCCTGCC | 165 |
| 13257 | GGGGAAGTCACCGCCTGCCT | 166 |
| 13258 | GGGAAGTCACCGCCTGCCTC | 167 |
| 13259 | GGAAGTCACCGCCTGCCTCG | 168 |
| 13260 | GAAGTCACCGCCTGCCTCGG | 169 |
| 13261 | AAGTCACCGCCTGCCTCGGC | 170 |
| 13262 | AGTCACCGCCTGCCTCGGCT | 171 |
| 13263 | GTCACCGCCTGCCTCGGCTC | 172 |
| 13264 | TCACCGCCTGCCTCGGCTCG | 173 |
| 13265 | CACCGCCTGCCTCGGCTCGA | 174 |
| 13266 | ACCGCCTGCCTCGGCTCGAC | 175 |
| 13267 | CCGCCTGCCTCGGCTCGACC | 176 |
| 13268 | CGCCTGCCTCGGCTCGACCC | 177 |
| 13269 | GCCTGCCTCGGCTCGACCCC | 178 |
| 13270 | CCTGCCTCGGCTCGACCCCC | 179 |
| 13271 | CTGCCTCGGCTCGACCCCCG | 180 |
| 13272 | TGCCTCGGCTCGACCCCCGC | 181 |
| 13273 | GCCTCGGCTCGACCCCCGCA | 182 |
| 13274 | CCTCGGCTCGACCCCCGCAG | 183 |
| 13275 | CTCGGCTCGACCCCCGCAGG | 184 |
| 13276 | TCGGCTCGACCCCCGCAGGG | 185 |
| 13277 | CGGCTCGACCCCCGCAGGGC | 186 |
| 13278 | GGCTCGACCCCCGCAGGGCA | 187 |
| 13279 | GCTCGACCCCCGCAGGGCAG | 188 |
| 13280 | CTCGACCCCCGCAGGGCAGG | 189 |
| 13281 | TCGACCCCCGCAGGGCAGGA | 190 |
| 13282 | CGACCCCCGCAGGGCAGGAC | 191 |
| 13283 | GACCCCCGCAGGGCAGGACC | 192 |
| 13284 | ACCCCCGCAGGGCAGGACCC | 193 |
| 13285 | CCCCCGCAGGGCAGGACCCT | 194 |
| 13286 | CCCCGCAGGGCAGGACCCTG | 195 |
| 13287 | CCCGCAGGGCAGGACCCTGG | 196 |
| 13288 | CCGCAGGGCAGGACCCTGGG | 197 |
| 13289 | CGCAGGGCAGGACCCTGGGC | 198 |
| 13290 | GCAGGGCAGGACCCTGGGCG | 199 |
| 13291 | CAGGGCAGGACCCTGGGCGA | 200 |
| 13292 | AGGGCAGGACCCTGGGCGAC | 201 |
| 13293 | GGGCAGGACCCTGGGCGACT | 202 |
| 13294 | GGCAGGACCCTGGGCGACTC | 203 |
| 13295 | GCAGGACCCTGGGCGACTCC | 204 |
| 13296 | CAGGACCCTGGGCGACTCCG | 205 |
| 13297 | AGGACCCTGGGCGACTCCGC | 206 |
| 13298 | GGACCCTGGGCGACTCCGCC | 207 |
| 13299 | GACCCTGGGCGACTCCGCCC | 208 |
| 13300 | ACCCTGGGCGACTCCGCCCG | 209 |
| 13301 | CCCTGGGCGACTCCGCCCGT | 210 |
| 13302 | CCTGGGCGACTCCGCCCGTT | 211 |
| 13303 | CTGGGCGACTCCGCCCGTTC | 212 |
| 13304 | TGGGCGACTCCGCCCGTTCC | 213 |
| 13305 | GGGCGACTCCGCCCGTTCCT | 214 |
| 13306 | GGCGACTCCGCCCGTTCCTC | 215 |
| 13307 | GCGACTCCGCCCGTTCCTCC | 216 |
| 13308 | CGACTCCGCCCGTTCCTCCA | 217 |
| 13309 | GACTCCGCCCGTTCCTCCAG | 218 |
| 13310 | ACTCCGCCCGTTCCTCCAGC | 219 |
| 13311 | CTCCGCCCGTTCCTCCAGCA | 220 |
| 13312 | TCCGCCCGTTCCTCCAGCAA | 221 |
| 13313 | CCGCCCGTTCCTCCAGCAAC | 222 |
| 13314 | CGCCCGTTCCTCCAGCAACC | 223 |
| 13315 | GCCCGTTCCTCCAGCAACCG | 224 |
| 13316 | CCCGTTCCTCCAGCAACCGC | 225 |
| 13317 | CCGTTCCTCCAGCAACCGCC | 226 |
| 13318 | CGTTCCTCCAGCAACCGCCG | 227 |
| 13319 | GTTCCTCCAGCAACCGCCGC | 228 |
| 13320 | TTCCTCCAGCAACCGCCGCT | 229 |
| 13321 | TCCTCCAGCAACCGCCGCTA | 230 |
| 13322 | CCTCCAGCAACCGCCGCTAA | 231 |
| 13323 | CTCCAGCAACCGCCGCTAAG | 232 |
| 13324 | TCCAGCAACCGCCGCTAAGC | 233 |
| 13325 | CCAGCAACCGCCGCTAAGCC | 234 |
| 13326 | CAGCAACCGCCGCTAAGCCC | 235 |
| 13327 | AGCAACCGCCGCTAAGCCCG | 236 |
| 13328 | GCAACCGCCGCTAAGCCCGG | 237 |
| 13329 | CAACCGCCGCTAAGCCCGGC | 238 |
| 13330 | AACCGCCGCTAAGCCCGGCG | 239 |
| 13331 | ACCGCCGCTAAGCCCGGCGC | 240 |
| 13332 | CCGCCGCTAAGCCCGGCGCA | 241 |
| 13333 | CGCCGCTAAGCCCGGCGCAC | 242 |
| 13334 | GCCGCTAAGCCCGGCGCACC | 243 |
| 13335 | CCGCTAAGCCCGGCGCACCG | 244 |
| 13336 | CGCTAAGCCCGGCGCACCGC | 245 |
| 13337 | GCTAAGCCCGGCGCACCGCT | 246 |
| 13338 | CTAAGCCCGGCGCACCGCTC | 247 |
| 13339 | TAAGCCCGGCGCACCGCTCC | 248 |
| 13340 | AAGCCCGGCGCACCGCTCCA | 249 |
| 13341 | AGCCCGGCGCACCGCTCCAA | 250 |
| 13342 | GCCCGGCGCACCGCTCCAAC | 251 |
| 13343 | CCCGGCGCACCGCTCCAACC | 252 |
| 13344 | CCGGCGCACCGCTCCAACCT | 253 |
| 13345 | CGGCGCACCGCTCCAACCTG | 254 |
| 13346 | GGCGCACCGCTCCAACCTGT | 255 |
| 13347 | GCGCACCGCTCCAACCTGTT | 256 |
| 13348 | CGCACCGCTCCAACCTGTTC | 257 |
| 13349 | GCACCGCTCCAACCTGTTCT | 258 |
| 13350 | CACCGCTCCAACCTGTTCTC | 259 |
| 13351 | ACCGCTCCAACCTGTTCTCC | 260 |
| 13352 | CCGCTCCAACCTGTTCTCCA | 261 |
| 13353 | CGCTCCAACCTGTTCTCCAC | 262 |
| 13354 | ACGCCACCGCCGGCGCCAGG | 111 |
| 13355 | GACGCCACCGCCGGCGCCAG | 110 |
| 13356 | TGACGCCACCGCCGGCGCCA | 109 |
| 13357 | GTGACGCCACCGCCGGCGCC | 108 |
| 13358 | TGTGACGCCACCGCCGGCGC | 107 |
| 13359 | TTGTGACGCCACCGCCGGCG | 106 |
| 13360 | TTTGTGACGCCACCGCCGGC | 105 |
| 13361 | TTTTGTGACGCCACCGCCGG | 104 |
| 13362 | CTTTTGTGACGCCACCGCCG | 103 |
| 13363 | CCTTTTGTGACGCCACCGCC | 102 |
| 13364 | GCCTTTTGTGACGCCACCGC | 101 |
| 13365 | CGCCTTTTGTGACGCCACCG | 100 |
| 13366 | CCGCCTTTTGTGACGCCACC | 99 |
| 13367 | CCCGCCTTTTGTGACGCCAC | 98 |
| 13368 | TCCCGCCTTTTGTGACGCCA | 97 |
| 13369 | GTCCCGCCTTTTGTGACGCC | 96 |
| 13370 | GGTCCCGCCTTTTGTGACGC | 95 |
| 13371 | TGGTCCCGCCTTTTGTGACG | 94 |
| 13372 | GTGGTCCCGCCTTTTGTGAC | 93 |
| 13373 | TGTGGTCCCGCCTTTTGTGA | 92 |
| 13374 | CTGTGGTCCCGCCTTTTGTG | 91 |
| 13375 | ACTGTGGTCCCGCCTTTTGT | 90 |
| 13376 | CACTGTGGTCCCGCCTTTTG | 89 |
| 13377 | CCACTGTGGTCCCGCCTTTT | 88 |
| 13378 | ACCACTGTGGTCCCGCCTTT | 87 |
| 13379 | CACCACTGTGGTCCCGCCTT | 86 |
| 13380 | ACACCACTGTGGTCCCGCCT | 85 |
| 13381 | GACACCACTGTGGTCCCGCC | 84 |
| 13382 | GGACACCACTGTGGTCCCGC | 83 |
| 13383 | CGGACACCACTGTGGTCCCG | 82 |
| 13384 | TCGGACACCACTGTGGTCCC | 81 |
| 13385 | CTCGGACACCACTGTGGTCC | 80 |
| 13386 | TCTCGGACACCACTGTGGTC | 79 |
| 13387 | TTCTCGGACACCACTGTGGT | 78 |
| 13388 | CTTCTCGGACACCACTGTGG | 77 |
| 13389 | ACTTCTCGGACACCACTGTG | 76 |
| 13390 | GACTTCTCGGACACCACTGT | 75 |
| 13391 | TGACTTCTCGGACACCACTG | 74 |
| 13392 | CTGACTTCTCGGACACCACT | 73 |
| 13393 | CCTGACTTCTCGGACACCAC | 72 |
| 13394 | GCCTGACTTCTCGGACACCA | 71 |
| 13395 | TGCCTGACTTCTCGGACACC | 70 |
| 13396 | GTGCCTGACTTCTCGGACAC | 69 |
| 13397 | CGTGCCTGACTTCTCGGACA | 68 |
| 13398 | ACGTGCCTGACTTCTCGGAC | 67 |
| 13399 | TACGTGCCTGACTTCTCGGA | 66 |
| 13400 | CTACGTGCCTGACTTCTCGG | 65 |
| 13401 | GCTACGTGCCTGACTTCTCG | 64 |
| 13402 | AGCTACGTGCCTGACTTCTC | 63 |
| 13403 | GAGCTACGTGCCTGACTTCT | 62 |
| 13404 | TGAGCTACGTGCCTGACTTC | 61 |
| 13405 | CTGAGCTACGTGCCTGACTT | 60 |
| 13406 | GCTGAGCTACGTGCCTGACT | 59 |
| 13407 | CGCTGAGCTACGTGCCTGAC | 58 |
| 13408 | CCGCTGAGCTACGTGCCTGA | 57 |
| 13409 | GCCGCTGAGCTACGTGCCTG | 56 |
| 13410 | CGCCGCTGAGCTACGTGCCT | 55 |
| 13411 | CCGCCGCTGAGCTACGTGCC | 54 |
| 13412 | GCCGCCGCTGAGCTACGTGC | 53 |
| 13413 | GGCCGCCGCTGAGCTACGTG | 52 |
| 13414 | CGCGGCAGGTGAGAGGGGAGCTGCCC | 558 |

Hot Zones (Relative upstream location to gene start site)
1-1880
2150-2240
2420-3050
3230-4130
4310-4400

### Examples

[0488] In FIG. 64, In MCF7 (human mammary breast cell line), MIF1_{—}1 (329) and MIF1_{—}2 (330) produced statistically significant (P<0.05) inhibition at 10 μM compared to the untreated and negative control values. The MIF1 sequences MIF1_{—}1 (329) and MIF1_{—}2 (330) fit the independent and dependent DNAi motif claims.

[0489] The secondary structure for MIF1_{—}1 (329) and MIF1_{—}2 (330) are shown in FIG. 65 and FIG. 66.

Genetic Code (5′ Upstream Region)

(SEQ ID NO: 13677)

CCATTCTGAGTATCTTCCAAGTGTTAGCTCCTTTAATCCTGGAAAGGACC
CCATGAAATTAGTACTTTTATTACCCCTGTTGTACATATGAGAGACTGAG
TAAAAGCCGGTGGCTTGTCCAGGGTCACACAGCTAACTGGAATGGCCAGG
AGTAGACCTGGTGACCATGGACCCCAGACCTTGATCACTGCACACGCTGC
GTCTGGGACCTCGCCTGGTACCTGAGGTCCGTGGCGCGCTGGTGCTGATC
ATTCAGAGTGCTCATGGGAAGTGTAGTCTAGAGTCTGTGTGCTTCCTGAT
CTCCTTGATCTCCATTTTATTGAGGAGGCCTTTAGGCCACCCGAGGGGTC
CAGAGTGACCCTGTGGATTAGCAGTGGAGCTCAGCTTGAGCCAGCGCTCT
TCAGGGGTCGTGTTCTGCCCCCATTCTCTGGTTCATTCTGCAGGTAGCAG
GGAATCATTGAAGATTAGAGAGAATCAAACACCTGGAGAGAGATGACTCT
GCCCGGGGAGCCCAGGCTCCTGTCTGGGTGCACACTCCAGGGCTAGATGG
TGACTTCTCAGCTACTCTAGCTTCATAGGCTCATAGTGCATGTGAGCACT
CATGTGGACACACGTGCACGCGCACACACATGGACACACACACACACACA
CACACCGCTGTCTTTGGAATCAGACCATGAAAATGCTTCCTCAGAGGCCT
AGGGGTGAGGAAGCTGAGGTGAGTTGTGCCTCCAGCTGGATGTGCTGGGA
TGGGGTGGGAGATGAGGTGGCCACACCTGGGTGGCAGGAACTCTGGGGCA
GTGAACCTTCTAACGAACAGATCTGGGATGCTGCCATGAGGAGGAAGAGG
GAGTCAGCAGCCATGCCTGCCAATGCCTCCTAGCGCATTTGTCCATGGTT
AGCGGATAATTATTGTGTCCCTATGGGTCCCAAGGTGTATTATTTTTTTT
TTGCTCTTATAATAAATCAACACAAATTTTTAGCAGCTTCAAACAACACG
CATTTATTATCTCACAGTTTCTGTGGGTCAGTAGTCCGGCGTGACATGAC
TAGGTCTTCTGTGTAAGGACTCGCATGGCCAAAGTCAAGGTATCTGAAGG
GACAAGGGAAAAATCCACTTCCAAGTTCAATCTGGTTGTGAGCAGAATTC
AGTTCCTTGTGGTTGTACCATGAGGTCTCTGGTCCCCTTCATCTTCAAAG
CCGGTAATGGACATCGAGTGTTTCTCTTGCTTGGAATCTGGCACTCTAGC
TGGAGAAAATTATCTGCTTTTAAGAGTTCATGTGATTAGATTGGGTGTAC
CCAGATGCTCCATGCTAATCTCCCTATTATGCACAGATGCATAATCCTAA
TTGCATCTGTGAAGTGCTTTTTGCCAGGTAACATGGCATACTTGTAGGTT
CCAGGGATTAGTGCTTGTCCTCCCCCTGCTATTCTTTAGTGGGCAGGGGG
TCATCTGCCTACCACGGAGGTAAGGGGTCAGGAGGTATGCATACAGCAAT
GCCCAAAAAGAGACTGTCCCCACTGGGATGGAGTTTACCGCCTAGACATG
CAGTCTTAACTCAGAAATATGGAGATAGCCTCGAAGGACAGGACAGGTAC
TGGGCACGTGTGGGAATGGACCAAGCCAGGTGCTCCGGGGGCTTTCCCAA
GGAACTAAGGCTGAGCCAAGAACTGAAGGATGAGTTGGAGTCAGATGAGG
GAAAATGTGGGCAAACTGGATTTCAGAACCAACCCCCAACCCTGGAGCCA
GGAGCCATGGTACTGAAGGACAGTGCGCCATAACTCAGAGAACCAGGGAG
GGTTGGCGGAGGCTCACAGGGACCGGGTTACCCCAGGGCCTTGTGACAGT
ACTACCCCTAGTATCAGAGGAGACTGTCATTGGCATTTAGGCCACTTGGT
GCTCATAACACCTCTATGTCAGGTGAACACTATTGTCATCCCCAAATTAC
AGATGGGGAAAGTGAGCCAAATGTCCATGCTAGTAAGAGGCAAATCATAT
CACTTCTTTGGGTACCCTTCTAGAAGGATGAGGCTGACTGCCACTGGAAA
CAGCTGGGGAGGGTACAAGGAGATGACAAGTGGCTCAGAGGCTGTCCTGG
CTATAAGAATTAAAGAGGAAAGAAACACCAAGGGTGGCTCGACAGTCAAC
AAGGACAGGTTTATTTTGGAAAACAAACTTGAGAGGGGCTTCTGGCCAAG
TTAGGTCAGAGCCACACTCTCTTACAAACTAAGGATATTTAAGGGTTTTG
GAGGGGGTTCTTATCATAGGTTCTGAATGTTTCTGTGTGAGGGAAAGTTT
ATTGCGGGGATGGAATGTCTCTGGTCAGAAGGGAGGCTGTCTCCGGGTTG
GCATGTTTCTGGTCAGAGAAGGGTTTATCTTAGGGTTGGAATGTTTCTGG
TTATGCTGACATTAGCTATTAGGCTGATATTTTCGGGCTGGATTTAGGCG
GCTTTTAATTAAGGGGGAACTTAGAATGGTGGTGTTTGTTCAAGATGGCA
ATGCTCCTGCTCCGTCACTGGCCAGGTAAGGCAACCCTTTGTTATGGTAA
CAACCTGAGATTGGCAGGGGCTCACCTCCAGGGGCAGCTCATGTGCTTGC
TGGCGAGGCTGCACCTTGTCATTCAGGTTCACAGGGCACAGGTCAACCAG
GCCCTGGCTCTTCAGTCTTCTGCCTGGAGTGACTTATGTAATTCTGCTCA
GCTTTCATAGGGCACAGGGAGTCGGGGCTAACTCTGCTGCCTGGGGCTGG
AAACAGACTCCTCCCTTGAGGAGCAGCAGTCCACCATAGGGAAGTCACAG
TGGTCCAGGCCAAAGGGGATGCAGGTAGTGTAGACTAGGCGGTAGTTCAG
GGAATGGAGAGAAGTGGGAATAAAGGGATAGTGAAAGGAAGCATATTTTA
CTGGCAGGTGATGAGGTGTAGGAGGACAAGTCATACATTTGGACTTTACA
GAGCAGTGGACACTCAGTCAGCTGCTGTCAGCGCCTGGGACTTAGGGGAG
TGCCCCTGGCTGGAGACATGGTATGGAGTGCCATCAGTTAGGGAGCCCTG
GGCACAGGTAAGAGAAGGTGTGACACCAGGAGGGAAAGAGTCTGGGGCCC
AGCTGCAGGAACCAATACCCATAGGCTATTTGTATAAATGGGCCATGGGG
CCTCCCAGCTGGAGGCTGGCTGGTGCCACGAGGGTCCCACAGGCATGGGT
GTCCTTCCTATATCACATGGCCTTCACTGAGACTGGTATATGGATTGCAC
CTATCAGAGACCAAGGACAGGACCTCCCTGGAAATCTCTGAGGACCTGGC
CTGTGATCCAGTTGCTGCCTTGTCCTCTTCCTGCTATGTCATGGCTTATC
TTCTTTCACCCATTCATTCATTCATTCATTCAGCAGTATTAGTCAATGTC
TCTTGTATGCCTGGCACCTGCTAGATGGTCCCCGAGTTTACCATTAGTGG
AAAAGACATTTAAGAAATTCACCAAGGGCTCTATGAGAGGCCATACACGG
TGGACCTGACTAGGGTGTGGCTTCCCTGAGGAGCTGAAGTTGCCCAGAGG
CCCAGAGAAGGGGAGCTGAGCACGTTTGAACCACTGAACCTGCTCTGGAC
CTCGCCTCCTTCCCTTCGGTGCCTCCCAGCATCCTATCCTCTTTAAAGAG
CAGGGGTTCAGGGAAGTTCCCTGGATGGTGATTCGCAGGGGCAGCTCCCC
TCTCACCTGCCGCGATGACTACCCCGCCCCATCTCAAACACACAAGCTCA
CGCATGCGGGACTGGAGCCCTTGAGGACATGTGGCCCAAAGACAGGAGGT
ACAGGGGCTCAGTGCGTGCAGTGGAATGAACTGGGCTTCATCTCTGGAAG
GGTAAGGGGCCATCTTCCGGGTTCACCGCCGCATCCCCACCCCCGGCACA
GCGCCTCCTGGCGACTAACATCGGTGACTTAGTGAAAGGACTAAGAAAGA
CCCGAGGCGAGGCCGGAACAGGCCGATTTCTAGCCGCCAAGTGGAGAACA
GGTTGGAGCGGTGCGCCGGGCTTAGCGGCGGTTGCTGGAGGAACGGGCGG
AGTCGCCCAGGGTCCTGCCCTGCGGGGGTCGAGCCGAGGCAGGCGGTGAC
TTCCCCACTCGGGGCGGAGCCGCAGCCTCGCGGGGGCGGGGCCTGGCGCC
GGCGGTGGCGTCACAAAAGGCGGGACCACAGTGGTGTCCGAGAAGTCAGG
CACGTAGCTCAGCGGCGGCCGCGGCGCGTGCGTCTGTGCCTCTGCGCGGG
TCTCCTGGTCCTTCTGCCATCATG

[0490] ERBB2

[0491] ERBB2 (also known as HER2/meu and CD340) is a receptor tyrosine kinase protein and member of the epidermal growth factor receptor family. ERBB2 contains extracellular, transmembrane, and intracellular domains. Ligand binding causes dimerization which activates downstream signaling pathways leading to proliferation, cell cycle progression, and cell survival promotion. ERBB2 is commonly associated with breast cancer where the gene is amplified or the protein is overexpressed leading to dysregulation of cell proliferation and survival. ERBB2 has also been associated with other cancers including lung and colorectal cancer.

[0492] Protein: ERBB2 (HER2) Gene: ERBB2 (Homo sapiens, chromosome 17, 37844167-37884915 [NCBI Reference Sequence: NC_{—}000017.10]; start site location: 37855813; strand: positive)

Gene Identification

| | |
|---|---|
| GeneID | 2064 |
| HGNC | 3430 |
| MIM | 164870 |

Targeted Sequences

| | | | Relative |
|---|---|---|---|
| | | | upstream |
| | | | location |
| | | | to gene |
| Sequence | Design | | start |
| ID No: | ID | Sequence (5′-3′) | site |
| 13415 | | CGGGAAGAGGATGCGCTGACCTGGC | 2571 |
| 13416 | | CACGCCCTGGGGAGGAGGCTCGAGAGG | 3267 |
| 13437 | | CGAGAGGGGCCGAGCCTCTGAAAAA | 3287 |
| 13452 | | CGTCTGGTCCACAGTCCGATGTCCA | 3944 |

Target Shift Sequences

| | | Relative |
|---|---|---|
| | | upstream |
| | | location to |
| Sequence | | gene |
| ID No: | Sequence (5′-3′) | start site |
| 13415 | CGGGAAGAGGATGCGCTGACCTGGC | 2571 |
| 13416 | CACGCCCTGGGGAGGAGGCTCGAGAGG | 3267 |
| 13417 | ACGCCCTGGGGAGGAGGCTC | 3268 |
| 13418 | CGCCCTGGGGAGGAGGCTCG | 3269 |
| 13419 | GCCCTGGGGAGGAGGCTCGA | 3270 |
| 13420 | CCCTGGGGAGGAGGCTCGAG | 3271 |
| 13421 | TCACGCCCTGGGGAGGAGGC | 3266 |
| 13422 | CTCACGCCCTGGGGAGGAGG | 3265 |
| 13423 | ACTCACGCCCTGGGGAGGAG | 3264 |
| 13424 | AACTCACGCCCTGGGGAGGA | 3263 |
| 13425 | GAACTCACGCCCTGGGGAGG | 3262 |
| 13426 | AGAACTCACGCCCTGGGGAG | 3261 |
| 13427 | CAGAACTCACGCCCTGGGGA | 3260 |
| 13428 | TCAGAACTCACGCCCTGGGG | 3259 |
| 13429 | GTCAGAACTCACGCCCTGGG | 3258 |
| 13430 | GGTCAGAACTCACGCCCTGG | 3257 |
| 13431 | GGGTCAGAACTCACGCCCTG | 3256 |
| 13432 | GGGGTCAGAACTCACGCCCT | 3255 |
| 13433 | TGGGGTCAGAACTCACGCCC | 3254 |
| 13434 | CTGGGGTCAGAACTCACGCC | 3253 |
| 13435 | GCTGGGGTCAGAACTCACGC | 3252 |
| 13436 | AGCTGGGGTCAGAACTCACG | 3251 |
| 13437 | CGAGAGGGGCCGAGCCTCTGAAAAA | 3287 |
| 13438 | GAGAGGGGCCGAGCCTCTGA | 3288 |
| 13439 | AGAGGGGCCGAGCCTCTGAA | 3289 |
| 13440 | GAGGGGCCGAGCCTCTGAAA | 3290 |
| 13441 | AGGGGCCGAGCCTCTGAAAA | 3291 |
| 13442 | GGGGCCGAGCCTCTGAAAAA | 3292 |
| 13443 | GGGCCGAGCCTCTGAAAAAG | 3293 |
| 13444 | GGCCGAGCCTCTGAAAAAGA | 3294 |
| 13445 | GCCGAGCCTCTGAAAAAGAA | 3295 |
| 13446 | CCGAGCCTCTGAAAAAGAAT | 3296 |
| 13447 | CGAGCCTCTGAAAAAGAATG | 3297 |
| 13448 | TCGAGAGGGGCCGAGCCTCT | 3286 |
| 13449 | CTCGAGAGGGGCCGAGCCTC | 3285 |
| 13450 | GCTCGAGAGGGGCCGAGCCT | 3284 |
| 13451 | GGCTCGAGAGGGGCCGAGCC | 3283 |
| 13452 | CGTCTGGTCCACAGTCCGATGTCCA | 3944 |
| 13453 | GTCTGGTCCACAGTCCGATG | 3945 |
| 13454 | TCTGGTCCACAGTCCGATGT | 3946 |
| 13455 | CTGGTCCACAGTCCGATGTC | 3947 |
| 13456 | TGGTCCACAGTCCGATGTCC | 3948 |
| 13457 | GGTCCACAGTCCGATGTCCA | 3949 |
| 13458 | GTCCACAGTCCGATGTCCAG | 3950 |
| 13459 | TCCACAGTCCGATGTCCAGG | 3951 |
| 13460 | CCACAGTCCGATGTCCAGGC | 3952 |
| 13461 | CACAGTCCGATGTCCAGGCC | 3953 |
| 13462 | ACAGTCCGATGTCCAGGCCA | 3954 |
| 13463 | CAGTCCGATGTCCAGGCCAC | 3955 |
| 13464 | AGTCCGATGTCCAGGCCACA | 3956 |
| 13465 | GTCCGATGTCCAGGCCACAA | 3957 |
| 13466 | TCCGATGTCCAGGCCACAAA | 3958 |
| 13467 | CCGATGTCCAGGCCACAAAC | 3959 |
| 13468 | CGATGTCCAGGCCACAAACT | 3960 |
| 13469 | TCGTCTGGTCCACAGTCCGA | 3943 |
| 13470 | GTCGTCTGGTCCACAGTCCG | 3942 |
| 13471 | AGTCGTCTGGTCCACAGTCC | 3941 |
| 13472 | GAGTCGTCTGGTCCACAGTC | 3940 |
| 13473 | GGAGTCGTCTGGTCCACAGT | 3939 |
| 13474 | AGGAGTCGTCTGGTCCACAG | 3938 |
| 13475 | GAGGAGTCGTCTGGTCCACA | 3937 |
| 13476 | GGAGGAGTCGTCTGGTCCAC | 3936 |
| 13477 | GGGAGGAGTCGTCTGGTCCA | 3935 |
| 13478 | CGGGAGGAGTCGTCTGGTCC | 3934 |
| 13479 | TCGGGAGGAGTCGTCTGGTC | 3933 |
| 13480 | ATCGGGAGGAGTCGTCTGGT | 3932 |
| 13481 | AATCGGGAGGAGTCGTCTGG | 3931 |
| 13482 | AAATCGGGAGGAGTCGTCTG | 3930 |
| 13483 | GAAATCGGGAGGAGTCGTCT | 3929 |

Hot Zones (Relative upstream location to gene start site)
100-4510

### Examples

Genetic Code (5′ Upstream Region)

(SEQ ID NO: 13678)

GGGGGCACCAGTAGAATGGCCAGGACAAACGCAGTGCAGCACAGAGACTC
AGACCCTGGCAGCCATGCCTGCGCAGGCAGTGATGAGAGTGACATGTACT
GTTGTGGACATGCACAAAAGTGAGGTGAGTCGCAGGACAGAAGAGTGCTT
TTTGTTTCAGCAGAGCAGCCTGGGGAGAGATAAAAGCTACTCCTGGGGCC
TGGGCCTGCATTCCTGAGATGTGGGTAAGAGGGGCCCAGGGTCAGAGTGT
CTGGCAAGCTTGGCTCTGCCCCTTTGCTGTCCTGGAGACTAGGGCTAATC
CTGGGCTCAGGGAGTGGCCTCCCCATGGTTAGGATACAAGTGCTCATCAA
GGGCCACCCCTAGGAAGGACCAATTTTCCTATCAGAAGCTTCTAAGTTAT
CCTCCTTTGGCCCAAAGGGACACCTCAAGCCTACTCTGAGGAACTCTTTC
CAATGAACTAATTCCTACAGTCACTTCCCCAGCAACCTGTGCCTCAGCCT
CAAGGCACTGTGGGGTAGGCCTCAGTTTGTGGCCTGGACATCGGACTGTG
GACCAGACGACTCCTCCCGATTTCTGTTTGTTTTCAGTCCTCTGACCCCA
AGCTGGCTGGTGAAGTAGGTAGAGGGAGGAGACTTTGGTGCATGCATACA
CACACACACACACACACACACACACACACACACACACACACACACACACA
CGTCTCCTGTGCCCCCCAGTCTCCATGGCTGGTCAATGATTGACTGGCAT
TTCACAGGCCGCTGGTTGCAGCCCCAGCCTGTTGACTTAGAGGTCACCCT
CGGAAGCTAGAGCCCTGTCCTGCCTCTTCAGTGTCAGTGGTCACTCCACT
GCCCACAGGCTGGGGTCTTGGGCAAAACACACGCATCTGCCCTGATCTGA
GTTTGCTGCCCTCTGTCCCGCAGTCAGCCCCACTCTGTTCCCACTCCCTC
TCCCCAGCCCCCTAGCTAGACCCCTCTCACCAGCACCCCTTTCCCTTCCC
TGAGGGTCCCCCTCGCTGTCTTTGTCCCTCAGACATCCTCTTTCCTGGGC
TCTCCTGCCAGGCCCTGCTGGAGGGACAGTTAAGGAGGAAATCGAATCAG
CAGCGCCCACCCCTGCCCCCCTTCCTCTCCTCTTGTCAGACACCAGACGA
GGTTTTTTCCTCTGGCTTCCCAGCTCTGAATGGGCTCATTCTTTTTCAGA
GGCTCGGCCCCTCTCGAGCCTCCTCCCCAGGGCGTGAGTTCTGACCCCAG
CTCCTCCCCCCATCCCCACTCCAGCCCCCTCTCCAGCTTGCTCCACCCTC
TCTACCGCCCACCGGGACTGGGCATTGTCTGCCAGTCCGGGTTTCTTCCT
GGGATTTGGGATGCAGAGAGGATGGGTTTGCTTGGGCGGGGGGGTGGAGA
GTGAAGGGGGGAAGCAGGATCTTTGTAGAGGGAGGGACCTACAGTTACCT
GGACTTCTTTCCTCTGTCTCCCCTCTTGGTACCCTTGACTGGGGCTCTTG
AGGGTAATGGGTGAAGCCAAATCTGCCATGGCTCAGTTCCCAGCTCAGCT
CTGTGACCTTGGGAAAGTTCCTTTAGCTCGTGGAATCTCAAGGCTCAAGG
TTCCTCTTCTGCAAAATGGGGAATGATAACACCTGCCTCCTCTGGAGTCT
TGGGGACTCAGTGTTCTGAGGAACGTGGCTGTAGGTCAGAGTGGCACAGA
GTAGGGTCCAATGAAGCATGGCGTCCACAGTAGCTTTCCTGACTGGACTA
ACCTTTCCGGACACAACAGCAGGGCAGGGGTGGGGCCTGGGGAGAAAGGA
CACCTCTAACCCTGATCCTAACATCCCGATGGCCTCTAAGGCTGCCTGCA
CACTCATCCAGGTGCAAGCCCTCCAAGGTGTGGTGTGATGAACCAGTGAC
TCCTGGAGCCAGGTCAGCGCATCCTCTTCCCGCAGGGCTGTAAGCTGCAG
GACTGAGAGGCAGGTTGACCAGGTCCTGGGCTGGATGATGGGGTGAGAGT
AAGGGGTCAGTTTTGATACATGCCCAACTTTTCTCTCTAGCCCTAAGACA
TCCTGGGCAAATTGCTTACCTCAGTTCCCCTGATCCTCACCCTAACCCTA
ACACCAGCTCAAGAGAAAATAGGGATATTGATGGCCATCCAGAAGGGCTG
CTGTGTTCCATACACAGCAATATTTCTCGAATGTTTGTGACAGCGGTCCA
AGGAATAAGTTAATTTTACATTATCACTCTGGATACCTGTACAAAACTCC
ACCTTATCCTTACTATATGAATGTGCTAGGGTTGTTTTTTTGTTTTGTTT
TTTTTTTTTTTTTTTGAGACAGAGTTTCGCTCTTGTTGCCCAGGCTGGAG
TACAATGGCGCGATCTTGGCTCACCGCAACCTCCGCTTCCCAGGTTCAAG
CGATTCACCTGCCTCAGCCTTCCCGAGTAGCTGGGATTACAGGCATGCGC
CACCATGCCCGGCTAATTTTGTGTTTTTAGTAGAGACAGGGTTTCTCCAT
GTTGGTCAGGCTGGTACCAAACTCCCGACCTCAGGTGATCCACCTGCCTT
GGCCTCCCAAAGTGCTGCAATTACAGGCATGAGCCACCGCACCCAGCCGT
GCTAGGGTCTTTTTCTGTTCAATTCCTTTCTCTCTCTTGCTCTCTTTCTT
TCTTTCAATGGAGTCTTACTCTGTCACCCAGGCTGGAGTGCAGTGGCAAG
ATCTCAGCTCACTGCAACCTCTGCCCTCTGAGTTCAAGCAATTCTCCTGC
CTCAGCCTCCCGAGTAGCTGGGATTACAGGTGCCTGCCACCACACCTAGT
TAATTTTTGTACTTTTAGTAGAGATGGGGTTTTGTCATGTTGGCCAGGCT
GGTCTCGAACTCCTGACCTCGTGATCTGCCTGTCTTGGCCTCCCAAAGTG
CTGGGATTACAGGCATGAGCCGCCATACTCGGCCAACTTTGTATTACTTT
CTTAAAGAGAGTTTCCCAAATTATATAAGCTTCAGGCCCCACAAAACCTA
GATCTGCCCCAGTATAACTAAATCTGGGACCATTTATTGAGCAATTATTA
TGTGCCAAGTATTGCGCTGAGTGCTTCCAGAGCATTATCTCCTTTAACCC
CAGCATAGTATGTCAGATGCTGTTTTACAGATGAGCCAACTGAGACCAGA
GATGCTCAGTCACTTGCCCAAGGTGACATGACTGATATGGAATAGAGTCA
AGATTTTTTTTTTTTTTTTTGACACGGAGTCTCACTCTGTCTCCCAGGCT
GGAGTGCAGAGGCGCAATCTCAGCTCACTGCAAGCTCTGCCTCCCAGGTT
CACGCCATTCTCCTGCCTCAGCCTCCTGAGTAGCTGGGACTACAGGCACC
CGCCACCACACCTGGCTAATTTTTTGTATTTTTAGCAGAGACAGGGTTTC
ACCGTGTTAGCCAGGATGGTCTCGATCTCCTGACCTCGTGATCTGCCTGC
CTCGGCCTCCCAAAGTGCTGGAATTACAGGTGTGAGCCACCGCGACTGGC
CAGATTCAAGATTTGAACCCAGGTCCTCTTGGTCCCAGAGGCCCCTGTTT
CTCAACTCCCTAGGATGGCATAGCAACCTGTCCCACAAGAGGTGCCTGCT
TTAAGTGTGCTCAGCACATGGAAGCAAGTTTAGAAATGCAAGTGTATACC
TGTAAAGAGGTGTGGGAGATGGGGGGGAGGGAAGAGAGAAAGAGATGCTG
GTGTCCTTCATTCTCCAGTCCCTGATAGGTGCCTTTGATCCCTTCTTGAC
CAGTATAGCTGCATTCTTGGCTGGGGCATTCCAACTAGAACTGCCAAATT
TAGCACATAAAAATAAGGAGGCCCAGTTAAATTTGAATTTCAGATAAACA
ATGAATAATTTGTTAGTATAAATATGTCCCATGCAATATCTTGTTGAAAT
TAAAAAAAAAAAAAAAAGTCTTCCTTCCATCCCCACCCCTACCACTAGGC
CTAAGGAATAGGGTCAGGGGCTCCAAATAGAATGTGGTTGAGAAGTGGAA
TTAAGCAGGCTAATAGAAGGCAAGGGGCAAAGAAGAAACCTTGAATGCAT
TGGGTGCTGGGTGCCTCCTTAAATAAGCAAGAAGGGTGCATTTTGAAGAA
TTGAGATAGAAGTCTTTTTGGGCTGGGTGCAGTTGCTCGTGGTTGTAATT
CCAGCACTTTGGGAGGCTGAGGCGGGAGGATCACCTGAGGTTGGGAGTTC
AAGACCAGCCTCACCAACGTGGAGAAACCCTGTCTTTACTAAAAATACAA
AAAATTAGCTGGTCATGGTGGCACATGCCTGTAATCCCAGCTGCTCGGGA
GGCTGAGGCAGGAGAATCACTTGAACCAGGGAGGCAGAGGTTGTGGTGAG
CAGAGATCGCGCCATTGCTCTCCAGCCTGGGCAACAAGAGCAAAAGTTCG
TTTAAAAAAAAAAAAAAGTCCTTTCGATGTGACTGTCTCCTCCCAAATTT
GTAGACCCTCTTAAGATCATGCTTTTCAGATACTTCAAAGATTCCAGAAG
ATATG

[0494] FGFR1

[0495] FGFR1 (fibroblast growth factor receptor 1) is a 100-135 kDa glycoprotein receptor tyrosine kinase specific for the fibroblast growth factor family. The FGFR1 receptor has an extracellular, transmembrane, and intracellular domain. The extracellular domain includes a single peptide and two or three Ig-like domains. The intracellular domain includes two tyrosine kinase subdomains. Stimulation of the FGFR1 receptor eventually has an effect on mitogenesis and differentiation. Specifically, FGFR1 has been associated with various diseases including Pfeiffer syndrome, various cancers, Kallmann syndrome, and osteoglyphic dysplasia.

[0496] Protein: FGFR1 Gene: FGFR1 (Homo sapiens, chromosome 8, 38411138-38468834 [NCBI Reference Sequence: NC_{—}000008.11]; start site location: 38314964; strand: negative)

Gene Identification

| | |
|---|---|
| GeneID | 2260 |
| HGNC | 3688 |
| HPRD | 00634 |
| MIM | 136350 |

Targeted Sequences

| | | | Relative |
|---|---|---|---|
| | | | upstream |
| | | | location |
| Se- | | | to gene |
| quence | Design | | start |
| ID No: | ID | Sequence (5′-3′) | site |
| 13484 | | CGAGCCAGGCAGGGCCCCTCGCAAGTG | 1850 |
| 13522 | | GACGGATATGAGTCCAGAAGTTGCG | 1472 |
| 13535 | | TAGCTGCGTGCAGTGGCGCGCGCCTGT | 4910 |
| 13561 | | CCGCCTCGCCAGCTCCCGAGCGCGAGTT | 10239 |
| 13655 | | CGCCTCCTCCCAGGTGTGGGCTGGCTGCA | 3067 |
| | | GACCG | |

Target Shift Sequences

| | | Relative |
|---|---|---|
| | | upstream |
| | | location |
| Sequence | | to gene |
| ID | | start |
| No: | Sequence (5′-3′) | site |
| 13484 | CGAGCCAGGCAGGGCCCCTCGCAAGTG | 1850 |
| 13485 | GAGCCAGGCAGGGCCCCTCG | 1851 |
| 13486 | AGCCAGGCAGGGCCCCTCGC | 1852 |
| 13487 | GCCAGGCAGGGCCCCTCGCA | 1853 |
| 13488 | CCAGGCAGGGCCCCTCGCAA | 1854 |
| 13489 | CAGGCAGGGCCCCTCGCAAG | 1855 |
| 13490 | AGGCAGGGCCCCTCGCAAGT | 1856 |
| 13491 | GGCAGGGCCCCTCGCAAGTG | 1857 |
| 13492 | GCAGGGCCCCTCGCAAGTGA | 1858 |
| 13493 | CAGGGCCCCTCGCAAGTGAG | 1859 |
| 13494 | AGGGCCCCTCGCAAGTGAGT | 1860 |
| 13495 | GGGCCCCTCGCAAGTGAGTC | 1861 |
| 13496 | GGCCCCTCGCAAGTGAGTCA | 1862 |
| 13497 | GCCCCTCGCAAGTGAGTCAG | 1863 |
| 13498 | CCCCTCGCAAGTGAGTCAGT | 1864 |
| 13499 | CCCTCGCAAGTGAGTCAGTG | 1865 |
| 13500 | CCTCGCAAGTGAGTCAGTGC | 1866 |
| 13501 | CTCGCAAGTGAGTCAGTGCT | 1867 |
| 13502 | TCGCAAGTGAGTCAGTGCTG | 1868 |
| 13503 | CGCAAGTGAGTCAGTGCTGG | 1869 |
| 13504 | CCGAGCCAGGCAGGGCCCCT | 1849 |
| 13505 | CCCGAGCCAGGCAGGGCCCC | 1848 |
| 13506 | CCCCGAGCCAGGCAGGGCCC | 1847 |
| 13507 | CCCCCGAGCCAGGCAGGGCC | 1846 |
| 13508 | TCCCCCGAGCCAGGCAGGGC | 1845 |
| 13509 | CTCCCCCGAGCCAGGCAGGG | 1844 |
| 13510 | CCTCCCCCGAGCCAGGCAGG | 1843 |
| 13511 | GCCTCCCCCGAGCCAGGCAG | 1842 |
| 13512 | TGCCTCCCCCGAGCCAGGCA | 1841 |
| 13513 | CTGCCTCCCCCGAGCCAGGC | 1840 |
| 13514 | CCTGCCTCCCCCGAGCCAGG | 1839 |
| 13515 | CCCTGCCTCCCCCGAGCCAG | 1838 |
| 13516 | GCCCTGCCTCCCCCGAGCCA | 1837 |
| 13517 | AGCCCTGCCTCCCCCGAGCC | 1836 |
| 13518 | CAGCCCTGCCTCCCCCGAGC | 1835 |
| 13519 | TCAGCCCTGCCTCCCCCGAG | 1834 |
| 13520 | TTCAGCCCTGCCTCCCCCGA | 1833 |
| 13521 | CTTCAGCCCTGCCTCCCCCG | 1832 |
| 13522 | GACGGATATGAGTCCAGAAGTTGCG | 1472 |
| 13523 | ACGGATATGAGTCCAGAAGT | 1473 |
| 13524 | CGGATATGAGTCCAGAAGTT | 1474 |
| 13525 | TGACGGATATGAGTCCAGAA | 1471 |
| 13526 | CTGACGGATATGAGTCCAGA | 1470 |
| 13527 | TCTGACGGATATGAGTCCAG | 1469 |
| 13528 | GTCTGACGGATATGAGTCCA | 1468 |
| 13529 | TGTCTGACGGATATGAGTCC | 1467 |
| 13530 | ATGTCTGACGGATATGAGTC | 1466 |
| 13531 | GATGTCTGACGGATATGAGT | 1465 |
| 13532 | TGATGTCTGACGGATATGAG | 1464 |
| 13533 | GTGATGTCTGACGGATATGA | 1463 |
| 13534 | AGTGATGTCTGACGGATATG | 1462 |
| 13535 | TAGCTGCGTGCAGTGGCGCGCGCCTGT | 4910 |
| 13536 | AGCTGCGTGCAGTGGCGCGC | 4911 |
| 13537 | GCTGCGTGCAGTGGCGCGCG | 4912 |
| 13538 | CTGCGTGCAGTGGCGCGCGC | 4913 |
| 13539 | TGCGTGCAGTGGCGCGCGCC | 4914 |
| 13540 | GCGTGCAGTGGCGCGCGCCT | 4915 |
| 13541 | CGTGCAGTGGCGCGCGCCTG | 4916 |
| 13542 | GTGCAGTGGCGCGCGCCTGT | 4917 |
| 13543 | TGCAGTGGCGCGCGCCTGTA | 4918 |
| 13544 | GCAGTGGCGCGCGCCTGTAG | 4919 |
| 13545 | CAGTGGCGCGCGCCTGTAGT | 4920 |
| 13546 | AGTGGCGCGCGCCTGTAGTC | 4921 |
| 13547 | GTGGCGCGCGCCTGTAGTCC | 4922 |
| 13548 | TGGCGCGCGCCTGTAGTCCC | 4923 |
| 13549 | GGCGCGCGCCTGTAGTCCCA | 4924 |
| 13550 | GCGCGCGCCTGTAGTCCCAG | 4925 |
| 13551 | CGCGCGCCTGTAGTCCCAGC | 4926 |
| 13552 | GCGCGCCTGTAGTCCCAGCT | 4927 |
| 13553 | CGCGCCTGTAGTCCCAGCTA | 4928 |
| 13554 | GCGCCTGTAGTCCCAGCTAC | 4929 |
| 13555 | CGCCTGTAGTCCCAGCTACT | 4930 |
| 13556 | TTAGCTGCGTGCAGTGGCGC | 4909 |
| 13557 | ATTAGCTGCGTGCAGTGGCG | 4908 |
| 13558 | AATTAGCTGCGTGCAGTGGC | 4907 |
| 13559 | AAATTAGCTGCGTGCAGTGG | 4906 |
| 13560 | AAAATTAGCTGCGTGCAGTG | 4905 |
| 13561 | CCGCCTCGCCAGCTCCCGAGCGCGAGTT | 10239 |
| 13562 | CGCCTCGCCAGCTCCCGAGC | 10240 |
| 13563 | GCCTCGCCAGCTCCCGAGCG | 10241 |
| 13564 | CCTCGCCAGCTCCCGAGCGC | 10242 |
| 13565 | CTCGCCAGCTCCCGAGCGCG | 10243 |
| 13566 | TCGCCAGCTCCCGAGCGCGA | 10244 |
| 13567 | CGCCAGCTCCCGAGCGCGAG | 10245 |
| 13568 | GCCAGCTCCCGAGCGCGAGT | 10246 |
| 13569 | CCAGCTCCCGAGCGCGAGTT | 10247 |
| 13570 | CAGCTCCCGAGCGCGAGTTG | 10248 |
| 13571 | AGCTCCCGAGCGCGAGTTGG | 10249 |
| 13572 | GCTCCCGAGCGCGAGTTGGA | 10250 |
| 13573 | CTCCCGAGCGCGAGTTGGAG | 10251 |
| 13574 | TCCCGAGCGCGAGTTGGAGG | 10252 |
| 13575 | CCCGAGCGCGAGTTGGAGGA | 10253 |
| 13576 | GCCGCCTCGCCAGCTCCCGA | 10238 |
| 13577 | CGCCGCCTCGCCAGCTCCCG | 10237 |
| 13578 | CCGCCGCCTCGCCAGCTCCC | 10236 |
| 13579 | GCCGCCGCCTCGCCAGCTCC | 10235 |
| 13580 | CGCCGCCGCCTCGCCAGCTC | 10234 |
| 13581 | CCGCCGCCGCCTCGCCAGCT | 10233 |
| 13582 | GCCGCCGCCGCCTCGCCAGC | 10232 |
| 13583 | AGCCGCCGCCGCCTCGCCAG | 10231 |
| 13584 | GAGCCGCCGCCGCCTCGCCA | 10230 |
| 13585 | GGAGCCGCCGCCGCCTCGCC | 10229 |
| 13586 | AGGAGCCGCCGCCGCCTCGC | 10228 |
| 13587 | GAGGAGCCGCCGCCGCCTCG | 10227 |
| 13588 | TGAGGAGCCGCCGCCGCCTC | 10226 |
| 13589 | CTGAGGAGCCGCCGCCGCCT | 10225 |
| 13590 | ACTGAGGAGCCGCCGCCGCC | 10224 |
| 13591 | CACTGAGGAGCCGCCGCCGC | 10223 |
| 13592 | TCACTGAGGAGCCGCCGCCG | 10222 |
| 13593 | CTCACTGAGGAGCCGCCGCC | 10221 |
| 13594 | ACTCACTGAGGAGCCGCCGC | 10220 |
| 13595 | GACTCACTGAGGAGCCGCCG | 10219 |
| 13596 | GGACTCACTGAGGAGCCGCC | 10218 |
| 13597 | GGGACTCACTGAGGAGCCGC | 10217 |
| 13598 | CGGGACTCACTGAGGAGCCG | 10216 |
| 13599 | CCGGGACTCACTGAGGAGCC | 10215 |
| 13600 | CCCGGGACTCACTGAGGAGC | 10214 |
| 13601 | TCCCGGGACTCACTGAGGAG | 10213 |
| 13602 | CTCCCGGGACTCACTGAGGA | 10212 |
| 13603 | CCTCCCGGGACTCACTGAGG | 10211 |
| 13604 | CCCTCCCGGGACTCACTGAG | 10210 |
| 13605 | TCCCTCCCGGGACTCACTGA | 10209 |
| 13606 | GTCCCTCCCGGGACTCACTG | 10208 |
| 13607 | TGTCCCTCCCGGGACTCACT | 10207 |
| 13608 | CTGTCCCTCCCGGGACTCAC | 10206 |
| 13609 | CCTGTCCCTCCCGGGACTCA | 10205 |
| 13610 | GCCTGTCCCTCCCGGGACTC | 10204 |
| 13611 | GGCCTGTCCCTCCCGGGACT | 10203 |
| 13612 | GGGCCTGTCCCTCCCGGGAC | 10202 |
| 13613 | CGGGCCTGTCCCTCCCGGGA | 10201 |
| 13614 | CCGGGCCTGTCCCTCCCGGG | 10200 |
| 13615 | CCCGGGCCTGTCCCTCCCGG | 10199 |
| 13616 | CCCCGGGCCTGTCCCTCCCG | 10198 |
| 13617 | GCCCCGGGCCTGTCCCTCCC | 10197 |
| 13618 | CGCCCCGGGCCTGTCCCTCC | 10196 |
| 13619 | TCGCCCCGGGCCTGTCCCTC | 10195 |
| 13620 | TTCGCCCCGGGCCTGTCCCT | 10194 |
| 13621 | CTTCGCCCCGGGCCTGTCCC | 10193 |
| 13622 | CCTTCGCCCCGGGCCTGTCC | 10192 |
| 13623 | GCCTTCGCCCCGGGCCTGTC | 10191 |
| 13624 | CGCCTTCGCCCCGGGCCTGT | 10190 |
| 13625 | CCGCCTTCGCCCCGGGCCTG | 10189 |
| 13626 | GCCGCCTTCGCCCCGGGCCT | 10188 |
| 13627 | CGCCGCCTTCGCCCCGGGCC | 10187 |
| 13628 | TCGCCGCCTTCGCCCCGGGC | 10186 |
| 13629 | CTCGCCGCCTTCGCCCCGGG | 10185 |
| 13630 | CCTCGCCGCCTTCGCCCCGG | 10184 |
| 13631 | GCCTCGCCGCCTTCGCCCCG | 10183 |
| 13632 | GGCCTCGCCGCCTTCGCCCC | 10182 |
| 13633 | GGGCCTCGCCGCCTTCGCCC | 10181 |
| 13634 | CGGGCCTCGCCGCCTTCGCC | 10180 |
| 13635 | GCGGGCCTCGCCGCCTTCGC | 10179 |
| 13636 | CGCGGGCCTCGCCGCCTTCG | 10178 |
| 13637 | CCGCGGGCCTCGCCGCCTTC | 10177 |
| 13638 | ACCGCGGGCCTCGCCGCCTT | 10176 |
| 13639 | AACCGCGGGCCTCGCCGCCT | 10175 |
| 13640 | AAACCGCGGGCCTCGCCGCC | 10174 |
| 13641 | GAAACCGCGGGCCTCGCCGC | 10173 |
| 13642 | GGAAACCGCGGGCCTCGCCG | 10172 |
| 13643 | AGGAAACCGCGGGCCTCGCC | 10171 |
| 13644 | CAGGAAACCGCGGGCCTCGC | 10170 |
| 13645 | CCAGGAAACCGCGGGCCTCG | 10169 |
| 13646 | TCCAGGAAACCGCGGGCCTC | 10168 |
| 13647 | GTCCAGGAAACCGCGGGCCT | 10167 |
| 13648 | AGTCCAGGAAACCGCGGGCC | 10166 |
| 13649 | CAGTCCAGGAAACCGCGGGC | 10165 |
| 13650 | CCAGTCCAGGAAACCGCGGG | 10164 |
| 13651 | CCCAGTCCAGGAAACCGCGG | 10163 |
| 13652 | CCCCAGTCCAGGAAACCGCG | 10162 |
| 13653 | TCCCCAGTCCAGGAAACCGC | 10161 |
| 13654 | CTCCCCAGTCCAGGAAACCG | 10160 |
| 13655 | CGCCTCCTCCCAGGTGTGGGCTGGCTGCAGACCG | 3067 |
| 13656 | CCGCCTCCTCCCAGGTGTGG | 3066 |
| 13657 | GCCGCCTCCTCCCAGGTGTG | 3065 |
| 13658 | TGCCGCCTCCTCCCAGGTGT | 3064 |
| 13659 | CTGCCGCCTCCTCCCAGGTG | 3063 |
| 13660 | CCTGCCGCCTCCTCCCAGGT | 3062 |
| 13661 | GCCTGCCGCCTCCTCCCAGG | 3061 |
| 13662 | AGCCTGCCGCCTCCTCCCAG | 3060 |
| 13663 | AAGCCTGCCGCCTCCTCCCA | 3059 |
| 13664 | AAAGCCTGCCGCCTCCTCCC | 3058 |
| 13665 | AAAAGCCTGCCGCCTCCTCC | 3057 |
| 13666 | GAAAAGCCTGCCGCCTCCTC | 3056 |
| 13667 | AGAAAAGCCTGCCGCCTCCT | 3055 |
| 13668 | CAGAAAAGCCTGCCGCCTCC | 3054 |
| 13669 | CCAGAAAAGCCTGCCGCCTC | 3053 |
| 13670 | CCCAGAAAAGCCTGCCGCCT | 3052 |
| 13671 | CCCCAGAAAAGCCTGCCGCC | 3051 |
| 13672 | TCCCCAGAAAAGCCTGCCGC | 3050 |
| 13673 | GTCCCCAGAAAAGCCTGCCG | 3049 |

Hot Zones (Relative upstream location to gene start site)
1350-1500
1750-1900
2500-5500
10150-10300

### Examples

Genetic Code (5′ Upstream Region)

(SEQ ID NO: 13679)

AGCTGGCAGGGCGAAGGGCCGACAAATCCTCCCTGACCCTCCCAGCTCTT
TGTTATCTCAGAGGGAAGGTTACATTTCTGTATGGGAGGCAAGGTGCCAG
GAGGCCTCGGGCAGAACAGAGACAGGCAGAGCTGCTGTCTGACCCCTGTT
GCCTGGAGCAGCTCAGGGCTGCCCTAGGGACACTCTCCCTCCACTGGCCT
GGGGCCCTTCCAGAAATGGGAGGGCTACATTTCAGAAAGAGGGCGAGTAG
AGGAGTGGGACAGAAAAGGAGCGAGGTGGGCTGGAAGGATAAAAGCAGCC
AACTCTCAATTATTCAGAAACCTGTCTGCAGTGTGTGGACAGCCCATGCC
TTTGCTGAGTTTCTCACCTTCTCTGTTCAGCTGCCATCAGCTCTTTCCCT
GAGAAGTGGAGGAGGGACCCTGGCAAGTTGGCCACTTGCTTTCATTTTGG
CTTCTTGATAAATCTATAGAGGATTTTTCAGCAGCAGGCCCATGTCCCTC
AACCCCAAACAAGCATTTAGATCATTATCTTTCTGTTTAAATCAAGAACG
CATTATTTAGCCTTTTATTTGGGGTTCAAGATACTCCTACAATGGTTCTA
AATCATAAGAAAAAGGGGCTTGATTTAAAACCCCTTGTTTTGGGCCAGGA
ATGGTGGCTCACGCCTGTAATCCCAGCACTTTGGGAGGCCAAGGTGGGCA
GATTACCTGAGGTCAGGAGTTCGAGACCAGCCTGGCCAACATGGTGAAAC
CCTGTCTCTACTAAAAATACAAAAATTAGCTGGGCATGGTGGCAGGTGTC
TGTAATCCCAGCTACTCGGGAGGCTGAGGCAGGAGAATCGCTTGAGCCCA
GAAGGCAGAGGTGAGCTGAGTGAGCTGAGATCGTGCCATTGCACTCCAGC
CTGGGCAAAAAGAGCAAGACTCCATCTCAGGAAAAAAAAAAAAAAAGAAA
ACAAAAAAAACCCTTTTTTGAGAAGAATTACGGAGCAAAGTAGAAAAATA
GTAGCTGGGTGTTAACATTAAATGCTGGATTTTTTTCATGGCTTGTCTTC
CCAATCATATTCCCTCAAATTGTGTTTCCTCCTCTGGTAACCCAGGTTGG
TTATGCTTAGCAAGTCCATGAACAATAAATATACATGGAAAACCTCCTGT
GTAGAATTGGTCAGACACCTAGATAAGATCCTTGCCCTAAAGCAGTTTAG
AAACCAGTTAGAAAGAAAGCAGAGTAAGGAAAACCACTAACAAAGCACGG
TATCAACTCAGTGGATAGTCAGCAAGTGAGCAGGGGGTCCAGGGACTGAC
AAAGCTGGGATGGGCAGGGAAGGCCTCTTGGGGGTAGGGTGTGAGTATGG
CCTTCTTACAAGCGTGTGATGTGTAGTAATTAAAATGCAGGAGGCCTAAT
GGGTGGGCAGCTTACATAGGAGTATAAACCAAGCTTGACCAGGAGCTGAA
AGGTTAAATGGTGGCTCTTAGGGGAAAACCCTATAAACAGTGGCTGAAGT
TCATTTATTCAACAAAGATATGAGTTCTTGTTTCTCATTTTTTGTTTTGT
ATTATTTTGTTTTGAGACAGGGTCTTACTCTGTCGCCCAGGCTGGAGTGT
AGTGGCTGGATCATAGCTCACTGCAGCCTCAAACTCCTGGGCTCAAGCCA
TCCTCCTTCTTCAGCCTCCACCTCCAGCTAATTTTTAAAAATATTTTGTA
GAGACAAGGGCTCACTTTGTTTCCCAGGCTGGTCTTGAACTTCTGGCTTC
AAGTGATCCTCCCGCTTCGGCCACCCAAAGTGCTGGGATTACAGGCGTGA
GCTGTAATTTAGTTGTTTATTTACTCATTTGTTCAACAAATACTTATTGA
ATATTTGCTCTTTGGCCAGTCAAGGGATTTCATGAGTGTCTACTATGTGA
ATAACACTGTGTTGGCCACTAGTCTGTCACCTACTGGTGGATTAGAAAAA
TAGCGCGAGGACCATTTTTTCTTTTCTTTTCTTTTTTTTTTTGAGACGGA
GTCTTGCTCTGTTGCCAGGCTGGAGTGCAGTGGCACAATCTCGGCTCACT
GCAACCTCCGCCTCCCGGGTTCAAGCGATTCCTCTGCCGCAGCCTCCCCA
GTAGCTGGGATTACAGGCAAGCGCCACCATGCCTGGCTAATTTTTTTGTA
TTTTAGTAGAGACGGGGTTTCACCTTGTTGGCAAGGATAGTCTCGATCTC
CCGACCTCGTGATCCACCCGCCTCGGCCTCCCAAAGTGCTGGGATTACAG
GCATAAGCCACCGCACCCGGCCAACTCTTTTCTTAAATTAGCCAGGGAGG
CGTGGGTGGGTTGGGTGAGGAGTTGGGTGGGGGGATCTCATTCAGTATTC
AAACTTCTACAAGTTTCGGGGTTGAGGTGGGTGATGGTAAGGGAACAGGC
CCTGCCACTACCTTTCATAGTGACTTCCATTTGTGTAATATTTTTGGTCC
ACTGAGAGCTATTATTTTATTTGATTCTTATGACCATCTTGTGAAGGAGT
ATCAACAGATACCCCGTTTTGATTTTATCAGATGCATGATTTGTCCTACA
TCAAACTTCATAAATGATGGACAGAATGGAGGAATCCTTCAGACCAAGTG
CTGCCTACTTCCCACCCCAATGGTGGCCTCAGCCTGGGCTCACATCACAC
GCCCCAAGGAGCCTTGGAAAAAATAAAGGCTCTTGGCTCCTTCCTGGGAC
AGCGTGATTCCTCATGTCTGAGCAGGCCCATGAACTTGTATTTTTCAGAC
GTTCCCTAGGACCCGTGTCCATCTGGATTAGGGAACCACTACATTATACC
ACTTCGCGGGAAGACTCAGGGGGAAGCATTTTAGCCACTTTCCTGTGTTC
CACAGTACTGGAGGGTGTTCTGAGTGGGCTGTGATTAATTTCCAAACCAA
CCACACGTCTCCCCTCAACTCCCACTGCTTACTCTTTGCTTCCTAGACAT
TCACTGCAGGCTGGAGACTTCTGGAAGCCAACAGCATCGCTGTAGAATTT
ACAGGGTCCAGTTCCCGGTGGACCACAAAACCTAAATTATGTGGCTGGGG
AAAGCTGAAATCCAAGGGAAGGGTTTGAGGAGGGGCTGACCTTATAATAA
AACCGGCTTGTATTTACTAAGTGTTAACTATGCGCTAGGCCCTCGTTGAC
GCCTCAACTCTATGTGAAAAGCACTATTATCCCCCATTTACAGATGGGAA
AACAGAGATTTAGAGCGCGAAAATCATTTCCCCAAGGCGCACAGACTCCA
AAGCCCACGCTACCAGGTACAACCTCAAGGCTGCGGCGTCTCTTCACCTG
CCCCCTAGCCCCCAAACCGCTGCTATGTCTAGGGCCTGACATTCCGGCGC
CCTCTGGGACGTGCTCAGATGCAGGGGCGCAAACGCCAAAGGAGACCAGG
CTGTAGGAAGAGAAGGGCAGAGCGCCGGACAGCTCGGCCCGCTCCCCGTC
CTTTGGGGCCGCGGCTGGGGAACTACAAGGCCCAGCAGGCAGCTGCAGGG
GGCGGAGGCGGAGGAGGGACCAGCGCGGGTGGGAGTGAGAGAGCGAGCCC
TCGCGCCCCGCCGGCGCATAGCGCTCGGAGCGCTCTTGCGGCCACAGGCG
CGGCGTCCTCGGCGGCGGGCGGCAGCTAGCGGGAGCCGGGACGCCGGTGC
AGCCGCAGCGCGCGGAGGAACCCGGGTGTGCCGGGAGCTGGGCGGCCACG
TCCGGACGGGACCGAGACCCCTCGTAGCGCATTGCGGCGACCTCGCCTTC
CCCGGCCGCGAGCGCGCCGCTGCTTGAAAAGCCGCGGAACCCAAGGACTT
TTCTCCGGTCCGAGCTCGGGGCGCCCCGCAGGGCGCACGGTACCCGTGCT
GCAGTCGGGCACGCCGCGGCGCCGGGGCCTCCGCAGGGCGATGGAGCCCG
GTCTGCAAGGAAAGTGAGGCGCCGCCGCTGCGTTCTGGAGGAGGGGGGCA
CAAGGTCTGGAGACCCCGGGTGGCGGACGGGAGCCCTCCCCCCGCCCCGC
CTCCGGGGCACCAGCTCCGGCTCCATTGTTCCCGCCCGGGCTGGAGGCGC
CGAGCACCGAGCGCCGCCGGGAGTCGAGCGCCGGCCGCGGAGCTCTTGCG
ACCCCGCCAGGACCCGAACAGAGCCCGGGGGCGGCGGGCCGGAGCCGGGG
ACGCGGGCACACGCCCGCTCGCACAAGCCACGGCGGACTCTCCCGAGGCG
GAACCTCCACGCCGAGCGAGGTAAGAGCCGCGGCGCCCCCGGATCTGGGG
CGGGCTTGGCGTCCCGAGCGGCCCCCGGCGCCGGAGCCTCCCGGCTGCGC
GCTTTGCCCGCCGCAGCCCAGCCGGGGCCGGCGCCTCCCTCCGCTCGCCG
CCCGCCCCTTTCACCTCCTGGCTCCCTCCCGGGCGATCCGCGCCCCTTGG
GTCTCCCCTCCCTTCCCTCCGTCCGCGTCTCCTGCGCCCCCTCCCTGCGC
TCGTCCCGCCGCTCTTCCCGCCGCCCAACTTTTCCTCCAACTCGCGCTCG
GGAGCTGGCGAGGCGGCGGCGGCTCCTCAGTGAGTCCCGGGAGGGACAGG
CCCGGGGCGAAGGCGGCGAGGCCCGCGGTTTCCTGGACTGGGGAGGAGGG
CGGGAGTGGGCGGCGAGGTGGGATGCGTTGTGTGTGTTATGTGTGTGTGT
TGCATTCCACTCCATGTCTTTTTGGTCCCCTTTTGGGGATTCACCCCCAA
TTCAGCAGGTAGCTTTGGGCTCAACGCTAAAAATCCGGGGCATTCCTAAG
TCCTTTTCCACCCCCGGGAAAGCCTGGGGTGCGGGTTGGGGTCGGATGGG
GTGGGAGATGAACTGCGGAGGACGTGGAGGGCTAGGTTAGCTTCTCTTGG
AATAGGTTTTAAGGAGGTGTCGTCACCAAATGGCTGAATCTGCTTGAGCT
GAGAGCGAAAAACGACTCCCCTTTCCAGAAGGGGTGATCTTATGACTTGG
ACGGTCTCTGAAAGGGTCGGAAGTTTGGGGAACGGGAGGACAACCCACGG
TCGTTAAGCCGAGGTGTGGGATGGGGGCGGAAGGACCGTTCGGTCCCAAT
CTGGTTCCTAGAGGTGGGGGAAGGGATGAGGGTTTTTGTCCGGTGTGGTT
CACTCGGCAGCGATGCGTATGCTTCTCTGGCCCAGACCCCTCTGCACCTC
GCTTCCCCTACCGTTATGTTTGGGGTTGGGAGAAAAGTGAGGCTACGACC
CATGTTTGCGGAGGAATTTTATGGACCTTGTAGATGGGGGTTCATATAGA
ACACACACCCCCTATGAGGCAGCCAGACACTTTTTTGGTGGTGGTGGGGG
GGGGGTGGGGTGTGAAGCCTGTTTCTTGTTCTGAGCCCAGAAGCTATCAA
CCCTTTTGAAAAACATTACCACGGTGCCTTTCTCCCCCAGCACTCCCCCA
CCCCCAATTTCCAGATGTAGCAGCCGCATCTGGTTCCGTTTCACCCCACA
CGGGTACACCGCAGCCGCATTATTAACTTCCCTCTTCCTCCCCTCCCCCT
CCCCCAAATTAAAACTCAGATTCTTCAGCCTGTCTTGACCACCTCCCTCC
TTAACATTTCTGGAGACTTGGAGATGCGGCGTTGAGATTCGGGGGAGAAA
AGAAAGTTCCCTTGGATCCCGAGTTATTTAAGATCTCACCAAGTTATTCG
CCGCCGCTGGTGGGTGGCGGCGGTCCGGGTGCTTTCTGGATTGCGCAGTA
AAGAGGCATCTTGGGAGATGGGGCCAAGGTTTTAGGGGGTGCCACTCGCG
AACGGTTCATCCGCTAGACTAGGGGGGCTCTTTGGCTGTGCGTCTGGCCA
GAACTGGCCTTGACGATGGAAGTTTCTGGAACCAAAGCGTTGCTTTCTCT
CCCTTGTGTTATAGCTGGAGCTGCGGGAGCGCCTGCCCTGCCCGGAGCCC
GCGGTCCCCTCTCGGCTGCCCCGCGGTGGCGTCACGCGCCCCTCCCGGAG
CAAGCCCGGTGCGCAGGGCCGGGGGCGTGGGCGGCTGCTGCCAGAGGCGC
TCTCTGTGTGTTTTTAAGGACTGATTTGGGCCGCATCCCCCGGAAACTAA
AGTGGGGTGTTTTACCGTTTAAATAACGGCTACAGGTTTGAAAGCGGGGT
TGGATTTTCGAGTTGTGTTTGGTAATAGTCTTTGAGGCAGGAAAGCGCCT
TGTGGTCCAAAGTTGCCGGGAGGGTGGGGAGAGTCGGTGTCTTACCCGCT
TCTTTCCAGCCTCTTTCAAATTGAAAACACTTCTCTGGTTTCCTTCTTTG
GGCGGTAGTTTTGGAGGCTGTAATGAAATCGCACTTTCTCTAGACGTGGT
AATTAAGGTGACTGTTTCCTCCGCAGATGTGCCCTACCCTTTGCACCTCC
GGACCAGCGCTTTTTTTGGAATACTATCTAGCCTTGAGACTGTTTAGCAG
AAAGTGGCCATTTTCCTCCCTTGGCCCGGGCTCCCGGTTTCCTCCCTGAG
GCTTGTTTAAAAGCGAAGTAGCAGGGCCCCGTGGGACGCGCCTTGGTCTG
GGTAATCACCCCCACGCCCGGGTCATCCACCTTCCTCTCGGTGACCGAGG
TTCAGCAGCCTCTGCTATTGCCGGCCGTCTTTGCCGATGGCCTGCCTCCC
TAATGACTTGTTTACATATCCTACCCCCAGTGGGTTAGGAGAAGCTCCGG
GGCTGCCCCGACCCTCCGAGTGCAGGGTGTTTGGGGACCGGGAGGCTGCT
GGGGCCTGACTCCAGCTGGGAGGGTTATGAACTGCATCAGTGACGAGCTG
CTTGAAATATCTGTTGCATTTACTCTTAGTCATAGCTGAGTGTCAGCTTT
TTAATGAGGTTCATCCAGATTGAGAGCCACTTGGACTGCGTACTTCACTG
CCTGCTTTTCCAAACATGCCTGCAGAAATGCTCATTTTCGAGGTATTTTT
CCCAATGGGAATTCAGGCCAGAGTGGGCACCACTTGAACAATCTTAGGGT
GCTTCTTTTCCTTGGCCTCTGGCCATGGAGGGTGTTAGACAGTTCCATTA
GGTGGCCCTTTGATAGCAAGGGAAGCAAAGGCTCAGGAAGAAATGGAGAA
GCGTCCCCCACTCCCTAGGGGCAGAGGATTAGATACATCGGTGCATCCCT
CAGGCTGGGCTAGCTTTATTCCTGGTGGACTCCAGAGGGCAAGAAAATTG
AATTGAACACTGGGTAGGCAGATTCAAGCCTTAGAGACCAAGGAAAATCC
ATGGGTTTTGCTTTTAGTGGTGTGCTCTTTGTTTTCAGTATTGACCTGAA
ACAAGACTCCTAAAATGAGAGATTTGCTGGTATGAACTTGGGGGTTTAGC
AGCCGGCTTCTACAAAGGCTTTTTTCTTGCCTTCGTTTCTAAAGTGTCTT
TCGTCAAAATGGCTGTTAGTTATAGAACATCCTAGCAAAGTTTGAGCCTG
TTGCTGCTGGAGGAAAAGGAGTTAGAATTGATTCAAATGTCTTATTCTGA
AAGGGCCTCACATCACTTGATAGTTTAATTTCCTCCTGGGAAATTTGTGT
CTTACATTTGTCTTCCCCAGAGCTTTGTAAAAGGCCTGAACGCACCAGGG
ACTAGTGGGAGCCCAGATGCAGAGCTTTAGAGAAGATTCTGGTGTTTCCA
GAGAGGATGAAATGTCAGACTTGGGCTAGGATATTTGTTTTTCCTCCTAA
GGTTGCATCTACTTTAAACAGAAATTCTCTCCTCGCCACCATTTATCTCT
CCCCTGCAATGAAAGAAACCATGTTTAGGGCCCTCTCCCCCATTTAATAG
CCCTCACATGGATGAACTATCCCAAGAATTTGGTGGGGTTCCACTCATAG
TACATCCTGTCTTCAAGAGCAAGGTTTTCTAGATTATGTGCAGCAGTTCG
TGTTTCACTTGTTGCTTTTTTTTTTTTTTTTTTTTTTTGAGATAGTCTCG
CTCTGTCGCCCAGGCTGGAGTGCTGTGGCGCTATCTCAGGTCACTGCAAC
CTCCGCCTTCCGGTTGAAGCGATTCTCCTGCCCCAGCCTCCCTAGTAGCT
GGGATTGCAAGCATGCGCCACCATGTCCGGCTAATTTTTTGTGTTTTTAA
TAGAGATGGTGTTTCACCATGTTGGCCAGGCTGGGCTTGAACTCCTGACC
TCAAGCAATCCGCTGGCCTCGGCCTCCCAAAATGCTGGGATTACAGGTGT
GAGCCATTGTGCCTGACCACTTATTGCTAATTTTTTATATGTCTCTTACT
TCCAAGGACATTTAGACACTTTTTTTTTTTAAAGAGACTCAAAAAATTAG
CATTTCCATTGGACCAACTAAAATTTAGCAAGCTGAGCTGAGTAACTTTC
TCCATATGTTTATTAAGTACTTGCCCCCTGCCCTCTCAACATGTGAGTAG
AGAATGGTCACTTTGGGGAAGAAATAAGTCTTATTCTCATCTGAAGGGAT
TAATGTTTTGGTGTTACTTCCTCAATTCTGAAGAACCAAGTTGTCCAGAA
ATTTTCTCAGGGTTCTTTGGACTAGAGTTTGGCTGGTTAACAAGGGGTAC
TACCTAATTGCTTTTCTCTGATATTCTCAGCCTCTTTTTCTGGAGGAGTA
TCTCTGTCAGTTTCTTTTCATCAGCCCTTTTTTTTCCTTCATTCACTTAC
TCATTCATCCAGTTAACAAACATGTTGGCATCTCCTGTGTACATGCTAGG
TGCCGAGGGTGTTAGCAAAGGTTAGGGAGGCACAGACCCTGTTCTGAAGG
AGCCTGCAGTTTCGTGGGGAGAGAAGAGAATGAAGAACATAAATAACAAT
CATATAATATGACCTAAGTGCTATGTGAGAGGGGCTAGTAATGTGGTTTG
CAAATTTGGAGGAATGAAATTCTCCAGCTAGAAGGCCCAAGAAAGTCTTA
TGGAAGAAACAGCTTCTTAAGGTGGGGTTCAGAGAAAAGGGAAGGGCTGG
CCTGTTGCAGAACAAGGAATGGCATGAAGAAAGTCTTGCACAGAGGCATG
GATGTTGCTTCGAGCTGTGGCGCCCTATAGAAATAGAACATGAGCAGCTG
GTCACAGTGGCTCATGCCTGTAATCCCAGCACTTTGGGAGGCCAAGGCAG
GCGGATTGCTTGAGCCCATGAGATGGAGATGAGCCTGGACAACATGGTGA
GACCCTGTGTCTACCAAAAAATACACAAATTAGATGAGTATGCTCGTGCT
TACTGGTAGTCCCGGCTATTCAGGAGGCTGAGGTGGGAGGATCACTTGAG
CCTAGGAGGCAGAGGCTGCAATAAGCTGTGATTGCACCACTGCATTCCAG
CCTGGGGGACAGAGGAAGACCCTGTTTAAAAAAAAAAAAAAAAAAAAAGC
CAGGCACAGTGGCTCATGCCTGTAATCCCAGCCCTTTGGGAGGCCAAGGC
AGGTGGATCACCTGAGGTCAGGAGTTCAAGACCAGCCTGGCCAACATGGT
GAAACCCTATTTCTACTAAAAATAAAAAAATTAGCCGGGCTTGGTGGCTC
ATGTCTGTAATCCCAGCTACTTGGGAGGCAGGAGAATCGTTTGAACCCGG
GAGGCGGTGGTTGAGCCAAGATTGCGCCACTGCAACTCCAGCCTGAGTGA
CAGAGCAAGACTCCATCTCAAAGAAAAAAAGAAAGGAAGAAAGAAATATA
ACATTATAACATGAGTTATGTATATGTTCAGATTTTCTAGAAGCCACATT
GGAAATTAAGTTAAAAGAAAGAAATAGGTAAAAAAAATTTTTTTTTTTGA
GACGGAGTCTCACTTTGTTGCCAGGCTGGAGTGCAGTGGCGCAATCTCGG
CTCACTGCAACCTCTGCCTCCCGGGTTCAAGCAATTCTCCTGCCTCAGCC
TCCTGAGTAGCTGGGACTACAGGCGCGCGCCACTGCACGCAGCTAATTTT
TGTACTTTTAGTAGAGACGGGGTTTCACCATGTTGGCCAGGATGGTGTCG
ACCTCTTGACCTCGTGATTTGCCCACCTCAGCCTCCCAAAGTGCTGGGAT
TACAGGCGTGAGCCACCGCGCCTGGCCAATATTTGTTTTTTAATTAACTT
GTTTGTTTAGATTTTATTTAATGTAACTATATTTCCAAAATATTATCATT
TGAACATGTAATCAATATAGAAATTATTGATGAGATACTTTACATTTTTT
TCATAACAAGTTTTTAAGATGCGGTGTATACTTTTTACTTATAGCATATC
CGTTAGCACCAGCCACATTTCAAGTGTGCAGTGGCCACTGTGTGGGCCAC
AGGTCTAGAATATAAGACATGAAGATGGAGAGTGAGAAATGCCTTTGGAA
AGGTTGGAAGTTCCTGTCCTTCTGCTGCCAATTACCAAATCTCCTGAGAG
TGCTATTAAGGAGTGACTCAAAGCACTACACAAAGAGAATTATAAATATC
TTAATATTATATCTGAAATCCAAATGCATAATTCTTTACATTTGGTTGGT
ACTTTAGAGAGGAGAGAATGGGCACAGTCACCCACACCACCCATTTGAGC
CTCATAATCACCTGTGATGTGGCTTCCTCTAGGTGGGAAACCGAGGCTTA
GAACGGTTAAGTGACTATCCCAGGGTGGCAAGATCATAAGTGGAAGGGTG
TGAATTCATACTGTCTCCAGCGGACAAGAATAAAAAGACCCAGGCTGGGT
GTGGTGGCTCATGCCTGTAATCCCAGCACTTTGGGAGGCCACTGTAGGTG
GATCTCCTGAGCCCAGGAGTTCATTACCAGCATGGGCAACATGGTGAGAC
CCCATTTTTATTAAATATACAGAAAATTAGCCCAGCTTCTCGGGAGGCTG
AGGTGGGAGGATCACTTGAGTCTGGGGGATGGAGGTTGTAGTGAGTTGAG
ATCGTGCCACTGCACTCTAGCTTGGGTGACAGAGCAACACTCTGTCTCAG
AAAGAATAAAAAGATTTGGCCATGAATTCGTCAGCTAGTTTTCCTTACAT
AATTTTTGGACAAGGAGATCTGACATTCATAGGTTTTTCTCTTAGAAGTG
GGAGAGCTTCAAGGTCACGTGGTCCGTCCAGCCCCTGCTATCTCACCAGA
CACTGTCCACCCTGTATGTTGGATCAGTACTCCAGTGAGAAGACAGCAGG
CACTTTCACCCATGCAGCCCATTCAGTCTTCATAACCACCTGTGATGGAG
GCAAGGCAAGTATTTCAGCCCCCTCTGATGAGTGGGAAACTGAGATGTGC
CCCCTCTCTGCTCCCCACCGAGGACCTCTGCATGCAGGCATGAATCCCAG
GAGCCTAGCTGATATTGGAGAGACGGGGCGGGGGGAACCAGCTGCAGGGT
CTTGGAGGAAGCTGCTGTGTACACCTGCAAGGCTGCAGGTTACATCTATC
TGTCAAGCAGTGAAGGAAGGAAGTTGTTTCTAAGGGATTGGAAAAATTCA
TTAATTAGTAGAATGAGAAACTGAGGTGAAGCAGGAGGTGGCAGGGTCCC
AGACAGCATGTTGGACTAGTGGCCTGTGTCACTGTGTTTTTTGCAGGCGG
GTGGCATGGGGTGTATGCTGACTTCTTATTCCAGGAGTTGGTGCCAGGAG
GCCAGGTTTTCTTAACATCCTTGTTTTACAGATGTCAAACTTGAGGGCCA
GAGGGGTAGGAGAGGAAGAGACTTTTTGTACCTTTTTTGGGAAAGAACAA
GAGGGAAGCTGGCAGATGAATTTGAAGTGCATTGACCAGGGAGCTGAGAG
AGGGCGGTCTGCAGCCAGCCCACACCTGGGAGGAGGCGGCAGGCTTTTCT
GGGGACAGAGTGGCCAAGTCGAAGCAAGCTTAACCATCTCAACATGACAC
CACTCTTTCCCATTGGAACCTGAGAACTTGTTCAGTATTCTGACACTTAG
CAAGGGACCTGGGTTTTCTTGGTCAGGTGTGCGTTTCTGGGTGACAGGCC
TGCATCAGGTGTATTTTCGGGATGTAGTAAGTTGTGGAATATGGGTTTAG
GGGCATCCTCTGGCAAGCACTGCTTCTATCCCAGCTCTGGGAATGTGCCC
CATGCAGTGTCCTAGATGGCCCATCTGTGGTCTGCTTCCAAGGGTCTTTC
TTTTAGTTAGTTAGTTTTGAGACAGAGTCTCACTCCGTCACCCAGGCTGG
AGTGCAGTGATGCAATCTCGGCTCACTGCAACCTCCACCTCCCAAATTCA
AGCAATTCTCATGCGTTAGCCTCCTGAGTAGCTGGGATTACAGGCGTGCA
CCACCACACCCAGCTAATTTTTGTATTTTTAGTAGACGAGGAATTTCACC
ATGTTGGCCAGTCTGGTCTCAACTCCCCACCTCAGGTGATACTCCCGCCT
CAGCCTCCCAAAGTCCCGGGATTGTAGGTATGAGCCAACATGCCCTGGCA
CAAGGGTCTATCTTTGACCAATGGAACTGCAAATCAAGCCTCTTTTGTTA
CCAGAGTTACCTTGGATTTACCCTTATCTACTTGGTTTGGATAAATTGAG
TTTGCATCAGATGGAGTCAGGCTTGATCAATCCCTTATTTACTTCCTCCC
ACCCTGTTCTCTAATATCCAAAAACCTTGAGGCACTATTACATGCTAGCT
ACATTTCCTTGAGTAAAGTACTTAACCTCTTTGAGCCTCAGTTTCTCCAT
TGCATAAAAGGAATAATAAAACTTATCCCCCATAAGTTTATAGTGAGGAA
TGAATTAATTCCTCACTATAGTTCTAAATTAATTCTACTTAGGGCATCCT
TGGTACATAGTGGGTGTTCAGTATTCATTTCATTTTCTCTTTTCTGATTC
CTTTCGTAAAAGTAGAAAAATGAAAGAGAAATGTTGACTTCTCTTTTGAT
TTGAAATCATTAAAACATTTTAGTAAGCCTTGGGAGGGAGCTAGTGGTGT
GGCATGTGTATCCCGCTGGCCAAGCACATGTGAACGAAGCCAAGAATCCA
GGGGCTTTTCTGCCAGCCAGCACTGACTCACTTGCGAGGGGCCCTGCCTG
GCTCGGGGGAGGCAGGGCTGAAGTACCACATTAGGGCATGTTCCGGGGAA
GTAGATTCTCTGAATAACTTGGATGGCTCCCTGGAGCATTTAGGACAGAA
GCCACCTGGAAAATAGAGATGGTCACCCCCACGTAGCCTTGACAGTGCCC
AGAAAGTCTTGTCACTTGGTAAATGTTAACAGCTATGATCCGTTCTTTAA
GACCCTGGGGAGTTTTAAGTTTTACCCCACCAGACCTGAGAAGGGTAAAG
GGCTGCAGATTCTGTTCTTTTAACTGGGGCCAGTGTGAGCCATCTTTGAC
TCAGTGCTTGCAATAGACCTTGATTCTGCAGTGGGACCTCCCAGGCCCCC
TTGCCCCCCGCAACTTCTGGACTCATATCCGTCAGACATCACTTGTCACC
TTCCAGCATCAGGGAGAACTGGATCCCTCCTGGCTCCACACTCTTAGGCT
CTTTGTAAGTAGCTGGTGAGGGTTTTCTTCTCTCTGCAAGGGAGGCTGGT
AGAACTATGGATGTGATTCGTACAATTTTAGAGACAAAAAGAAAGTACCC
AGGAGGTCATTTATTTCAGCTGCTTCATTGCATAGGTCGGGGAGTTGAGC
ATGGAGTCCAGCAGCTACTAACTAGTTATCTCTGTACCTGGCTTCCATTT
ACTGGTCCTTAGCTTGTTCCGTGATTCTTCATTGCCCCTTATTTCTCACC
AGAGGGACTGGTTGGCCCTAGATGGAGTGGTCTTTTTAAAATTTTTTTTT
TAAATTTTTTGAGACAGAGTCTCACTCTGTCACCTAGGCTGTAGTGCAGT
GCTGCGATCTCGGCTCACTGCAACCTCCGCCTCCTGAGTTCAAGCAATTC
TCCTGTCTCAGCCTCCTGAGTAGCTGGGATTACAGGTGTGTACCACTATG
CCCAGCTAATTTTTGTATTTTTAGTAGAGATGGGATTTCACCATATTGGC
CAGGTTGGTCTTGAACTCCTGACCTCAAATGATCTGCCCACCTTAGCCTC
CCGAAGTGCTGGGATTGCAGGTGTGAGCCACCGCACCTGGCCTGGGCAGA
GTGAAGTCTTATGCTGGGGAGCCATCAGCATGCTCAAACCTCCTGCAATT
GTAGCACACTTTGTAAAACTGTTTCCCACAAAAGGGCAGAACTATTTGGG
ACTTTCATGAGACCATTCACTTTGTAGCACATACTACTTTGAAGTTTATA
CCTTGGAAAACCTCATGATGGTATTCCCAGGCTTGCACGTAATCTGCACT
CAAAACATAGCTGTAGAATTGAACTAAAGCATCCCTCTGTCCAATTAAGA
CCTATAACCTCTCTTTTTGAGACAGAATCTCGCTCTGTCACCCAGGTTGG
AGTGCAGTGGTGCAATCTCAGCTCACTGCATCCTTCGCCTCCTGGATTCA
AGCGATTCTCTTGCCTTAGCCTCCGAAGTAACTGGGACTACAGGTGCGCG
CCACCACGCCTGGGTAATTTTTGTATTTTTAGTAGAGACGGGGTTTCGCC
ATGGCCAGGCTGGTCTCAAACTCCTGGCCTCAAGTGATCCTCCCGCCTCA
GCCTCCCAAAGTGCTGGGATTACAGGGTGCACCACCACACCCAGCCAGGA
CCTATGATCTAATTCATTGTTGGGGTAGCTTCACAATTTTCTTCTGGACG
CCTTAGTAAGTCCACACTTTAAGCAGCCACCACATGGCATACTTTACCTT
CTGTTTTTCCTTTCCCCTCCCCTACCTAGACCCTCCTAACTTTTGGGGTT
TTTTTCCTTTCCTCAGGGTCAGTTTGAAAAGGAGGATCGAGCTCACTGTG
GAGTATCCATGGAGATGTGGAGCCTTGTCACCAACCTCTAACTGCAGAAC
TGGGATG

[0498] III. DNA Methylation

[0499] In some embodiments, the present invention provides using oligonucleotide that are methylated at specific sites for screening purposes. The present invention is not limited to a particular mechanism. Indeed, an understanding of the mechanism is not necessary to practice the present invention. Nonetheless, it is contemplated that one mechanism for the regulation of gene activity is methylation of cytosine residues in DNA. 5-methylcytosine (5-MeC) is the only naturally occurring modified base detected in DNA (Ehrlick et al., Science 212:1350-1357 (1981)). Although not all genes are regulated by methylation, hypomethylation at specific sites or in specific regions in a number of genes is correlated with active transcription (Doerfler, Annu Rev. Biochem. 52:93-124 [1984]; Christman, Curr. Top. Microbiol. Immunol. 108:49-78 [1988]; Cedar, Cell 34:5503-5513 [1988]). DNA methylation in vitro can prevent efficient transcription of genes in a cell-free system or transient expression of transfected genes. Methylation of C residues in some specific cis-regulatory regions can also block or enhance binding of transcriptional factors or repressors (Doerfler, supra; Christman, supra; Cedar, Cell 34:5503-5513 (1988); Tate et al., Curr. Opin. Genet. Dev. 3:225-231 [1993]; Christman et al., Virus Strategies, eds. Doerfler, W. & Bohm, P. (VCH, Weinheim, N.Y.) pp. 319-333 [1993]).

[0500] Disruption of normal patterns of DNA methylation has been linked to the development of cancer (Christman et al., Proc. Natl. Acad. Sci. USA 92:7347-7351 [1995]). The 5-MeC content of DNA from tumors and tumor derived cell lines is generally lower than normal tissues (Jones et al., Adv. Cancer Res 40:1-30 [1983]). Hypomethylation of specific oncogenes such as c-myc, c-Ki-ras and c-Ha-ras has been detected in a variety of human and animal tumors (Nambu et al., Jpn. J. Cancer (Gann) 78:696-704 [1987]; Feinberg et al., Biochem. Biophys. Res. Commun. 111:47-54 [1983]; Cheah et al., JNCI73:1057-1063 [1984]; Bhave et al., Carcinogenesis (Lond) 9:343-348 [1988]. In one of the best studied examples of human tumor progression, it has been shown that hypomethylation of DNA is an early event in development of colon cancer (Goetz et al., Science 228:187-290 [1985]). Interference with methylation in vivo can lead to tumor formation. Feeding of methylation inhibitors such as L-methionine or 5-azacytodine or severe deficiency of 5-adenosine methionine through feeding of a diet depleted of lipotropes has been reported to induce formation of liver tumors in rats (Wainfan et al., Cancer Res. 52:2071s-2077s [1992]). Studies show that extreme lipotrope deficient diets can cause loss of methyl groups at specific sites in genes such as c-myc, ras and c-fos (Dizik et al., Carcinogenesis 12:1307-1312 [1991]). Hypomethylation occurs despite the presence of elevated levels of DNA MTase activity (Wainfan et al., Cancer Res. 49:4094-4097 [1989]). Genes required for sustained active proliferation become inactive as methylated during differentiation and tissue specific genes become hypomethylated and are active. Hypomethylation can then shift the balance between the two states. In some embodiment, the present invention thus takes advantage of this naturally occurring phenomena, to provide compositions and methods for site specific methylation of specific gene promoters, thereby preventing transcription and hence translation of certain genes. In other embodiments, the present invention provides methods and compositions for upregulating the expression of a gene of interest (e.g., a tumor suppressor gene) by altering the gene's methylation patterns.

[0501] The present invention describes the use of unmodified completely complementary DNA oligonucleotide sequences to inhibit gene expression. The present invention is not limited to the use of methylated oligonucleotides or modified oligonucleotides to identify therapeutic sequences. We describe the use of non-methylated oligonucleotides for the inhibition of gene expression and we prove this system works by providing the results of experiments conducted during the course of development of the present invention. For example we demonstrate that an unmethylated oligonucleotide targeted toward Bcl-2 inhibited the growth of lymphoma cells to a level that was comparable to that of a methylated oligonucleotide.

[0502] IV. Oligonucleotides

[0503] The term “oligonucleotide,” refers to a short length of single-stranded polynucleotide chain. Oligonucleotides are typically less than 200 residues long (e.g., between 8 and 100), however, as used herein, the term is also intended to encompass longer polynucleotide chains (e.g., as large as 5000 residues). Oligonucleotides are often referred to by their length. For example a 24 residue or base oligonucleotide is referred to as a “24-mer”. Oligonucleotides can form secondary and tertiary structures by self-hybridizing or by hybridizing to other polynucleotides. Such structures can include, but are not limited to, duplexes, hairpins, cruciforms, bends, and triplexes.

[0504] In some embodiments, the present invention provides DNAi oligonucleotides for inhibiting the expression of oncogenes. Exemplary design and production strategies for DNA is are described below. The below description is not intended to limit the scope of DNAi compounds suitable for use in the present invention. One skilled in the relevant recognizes that additional DNA is are within the scope of the present invention.

[0505] A. Oligonucleotide Design

[0506] In some embodiments, oligonucleotides are designed based on preferred design criteria. Such oligonucleotides can then be tested for efficacy using the methods disclosed herein. For example, in some embodiments, the oligonucleotides are methylated at least one, preferably at least two, and even more preferably, all of the CpG islands. In other embodiments, the oligonucleotides contain no methylation. The present invention is not limited to a particular mechanism. Indeed, an understanding of the mechanism is not necessary to practice the present invention. Nonetheless, it is contemplated that preferred oligonucleotides are those that have at least a 40% CG content and at least 1 CG dinucleotides. In some embodiments, oligonucleotides are designed with at least 1 A or T to minimize self hybridization. In some embodiments, commercially available computer programs are used to survey oligonucleotides for the ability to self hybridize. Preferred oligonucleotides are at least 10, and preferably at least 15 nucleotides and no more than 100 nucleotides in length. Particularly preferred oligonucleotides are 20-34 nucleotides in length. In some embodiments, oligonucleotides comprise the universal protein binding sequences CCGCCC and CGCG or the complements thereof. In some embodiments, oligonucleotides comprise the universal protein binding sequences (G/T)CCCGCCC(G) and the complements thereof. It is also preferred that the oligonucleotide hybridize to a promoter region of a gene upstream from the TATA box of the promoter. It is also preferred that oligonucleotide compounds are not completely homologous to other regions of the human genome. The homology of the oligonucleotide compounds of the present invention to other regions of the genome can be determined using available search tools (e.g., BLAST, available at the Internet site of NCBI).

[0507] In some embodiments, oligonucleotides are designed to hybridize to regions of the promoter region of an oncogene known to be bound by proteins (e.g., transcription factors). Exemplary oligonucleotide compounds of the present invention are shown in Table 3. The present invention is not limited to the oligonucleotides described herein. Other suitable oligonucleotides may be identified (e.g., using the criteria described above). Exemplary oligonucleotide variants of the disclosed oligonucleotides can include smaller oligonucleotide sequences of 20-mer or can be right or left shifted 20 base pairs. Candidate oligonucleotides may be tested for efficacy using any suitable method, including, but not limited to, those described in the illustrative examples below. Using the in vitro assay described below in the material and methods and Figures, candidate oligonucleotides can be evaluated for their ability to prevent cell proliferation or target inhibition at a variety of concentrations. Particularly preferred oligonucleotides are those that inhibit gene expression of target proteins as a low concentration (e.g., less that 20 μM, and preferably, less than or equal to 10 μM in the in vitro assays disclosed herein).

[0508] B. Materials and Methods

### Oligonucleotide Preparation (FIGS. 1-25, 27-30, 31-49, 54-67)

[0509] All oligonucleotides were synthesized utilizing cyanoethyl phosphoramidite chemistry, purified by reverse phase high-performance liquid chromatography (RP-HPLC), and lyophilized by The Midland Certified Reagent Company (Midland, Tex.). Methylated oligonucleotides were methylated at all CpG sites.

### Cell Culture (FIGS. 1-25, 27-30, 31-49, 54-67)

[0510] Human lung carcinoma cells (A549; ATCC) were cultivated in DMEM medium (ATCC) containing 10% fetal bovine serum (FBS; Invitrogen) and maintained under a humidified atmosphere of 5% CO2 at 37° C. Cells were split 1:8 at 90% confluence and used for experiments between passages 12 and 20 (2,500 cells per well were plated 12-24 hours prior to adding oligonucleotides).

[0511] Human breast carcinoma cells (MDA-MB-231; ATCC) were cultivated in Leibovitz's L-15 medium (ATCC) containing 10% fetal bovine serum (FBS; Invitrogen) and maintained under a humidified atmosphere at 37° C. Cells were split 1:6 at 90% confluence and used for experiments between passages 15 and 22 (2,500 cells per well were plated 12-24 hours prior to adding oligonucleotides).

[0512] Human prostate carcinoma cells (DU145; ATCC) were cultivated in EMEM medium (ATCC) containing 10% fetal bovine serum (FBS; Invitrogen) and maintained under a humidified atmosphere of 5% CO2 at 37° C. Cells are split 1:8 at 90% confluence and used for experiments between passages 10 and 16 (2,500 cells per well were plated 12-24 hours prior to adding oligonucleotides).

[0513] Human breast carcinoma cells (MCF-7; ATCC) were cultivated in 50:50 RPMI/DMEM medium (ATCC) containing 10% fetal bovine serum (FBS; Corning), 0.01 mg/mL insulin (Sigma-Aldrich) and maintained under a humidified atmosphere at 37° C. at 5% CO2. Cells were split 1:6 at 90% confluence and used for experiments between passages 15 and 18 (2,500 cells per well were plated 12-24 hours prior to adding oligonucleotides).

[0514] Human colorectal carcinoma cells (HCT-116; ATCC) were cultivated in McCoy's 5A medium (Corning) containing 10% fetal bovine serum (FBS; Corning) and maintained under a humidified atmosphere at 37° C. at 5% CO2. Cells were split 1:6 at 90% confluence and used for experiments between passages 4 and 7 (2,500 cells per well were plated 12-24 hours prior to adding oligonucleotides).

[0515] HepG2 cells were plated using 5,000 cells per well in 96 well plate (for both qPCR experiment and cell count experiments). Cells were incubated for 24 hours prior to treatment with DNAi oligonucleotides. Twenty-four hours after plating DNAi oligonucleotides were added to the cells at final concentration of 15 uM. At each timepoint (24, 72, and 144 hours) cells from 96 well plate were washed with 1×PBS once and total RNA isolated using MagMax-96 Total RNA isolation kit (Lifetech, cat#AM1830). At 72 hour timepoint cells were over 90% confluent, therefore cells were washed with 1×PBS twice, trypsinized with 0.05% Trypsin-EDTA and transferred from each individual well (96-well plate) into 24-well plate. STAT3 DNAi oligonucleotides were added to the cells in 24-well plate at final concentration of 15 uM.

[0516] HepG2 cells were trypsinized (as described above) and cells from each well (96-well plate) were diluted in 1 mL of complete growth medium prior to cell counting performed using Guava PCA-96 flow cytometry system. HepG2 cell culture work was performed at Altogen Labs (Austin, Tex.).

mRNA Expression Analysis and RNA Isolation (FIG. 67)

[0517] All RNA was isolated using the MAGMAX96 Total RNA Isolation kit (cat#AM1830; Lifetech). The manufacturer's protocol was followed, including a final elution of 50 μL elution solution. RNA was stored at −20° C. for later use.

### Reverse Transcription (RT) (FIG. 67)

[0518] Isolated RNA was reverse transcribed into cDNA in a single reaction containing RNase Inhibitor Protein (15518; Lifetech) and MMLV-Reverse Transcriptase (18057; Lifetech). RNA input into the RT reaction was based on a 7.5 μL input per 20 μL reaction size for all samples.

qPCR (FIG. 67)

[0519] Fluorescence based, real-time reverse transcription-PCR (qRT-PCR) is a standard tool used for quantification of mRNA levels. This technique has high throughput capabilities with both high sensitivity and specificity for the target of interest. The amplification reaction consisted of dNTPs (PCR grade; Roche) and Platinum Taq Polymerase (10966; Lifetech). Cycling conditions were as follows: 95° C. for 1 minute; then 50 cycles of 95° C. for 5 seconds and 60° C. for 20 seconds. Results were determined by real-time PCR on the ABI Prism 7900 SDS real-time PCR machine (Applied Biosystems, Foster City, Calif.). All qPCR work was performed at Altogen Labs (Austin, Tex.).

[0520] As shown in FIG. 67, PC2 (206; exposed at 15 μM), a PCSK9 targeted oligonucleotide, demonstrated an approximate 40% decrease of PCSK9 mRNA at 72 hours post-exposure compared to control PCSK9 mRNA levels in HepG2 cells. While PC2 (206) decreased PCSK9 mRNA expression, it was not cytotoxic to cells at either 24 or 72 hours post-exposure in the same experiment. This demonstrates that an oligonucleotide is capable of modulating target gene expression with expected phenotypic changes.

[0521] Altogen Labs (Austin, Tex.) performed the cell culture work for A549, MDA-MB-231, DU145 and START Preclinical (San Antonio, Tex.) performed the cell culture work for MCF-7 and HCT-116.

### Cell Growth Inhibition Assay (FIGS. 1-25, 27-30, 31-49, 54-66)

[0522] Cells were harvested from T-75 flask by a single wash with 1×PBS and incubation with 2 ml of 0.05% Trypsin-EDTA (Invitrogen) for 7 minutes at 37□C. Trypsin was inactivated by addition of 8 ml of complete medium (total volume of 10 ml). Cells were counted using hemocytometer and cell count confirmed by Guava PCA flow cytometry. Cells were then plated and assayed. Cell growth inhibition was assessed using a Vybrant MTT (3-(4,5-dimethylthiazol-2-yl)-2,5-diphenyltetrazolium bromide) Cell Proliferation Assay (cat#V13154) purchased from Life Technologies (Carlsbad, Calif.). For each cell line 2,500 cells per well were plated 12 hours prior to adding oligonucleotides. Absorbance measurements at 570 nm were made using a Molecular Devices Spectramax Plus (Sunnyvale, Calif.) microplate reader. Each treatment was run in quadruplicate. Altogen Labs (Austin, Tex.) and START Preclinical (San Antonio, Tex.) performed the cell growth inhibition assay. Included in Tables 4 and 5 are the sequences for the control and negative control oligonucleotides used in the experiments.

Oligonucleotide Preparation (FIGS. 26, 50-53; Descriptions Referenced in U.S. Pat. No. 7,524,827)

[0523] All oligonucleotides were synthesized, gel purified anal lyophilized by BIOSYNTHESIS (Lewisville, Tex.) or Qiagen (Valencia, Calif.). Methylated oligonucleotides were methylated at all CpG sites. Methylated Oligonucleotides were dissolved in pure sterile water (Gibco, Invitrogen Corporation) and used to treat cells in culture.

Cell Culture (FIGS. 26, 50-53; Descriptions Referenced in U.S. Pat. No. 7,524,827)

[0524] Human breast cancer cells, MCF7 and MDA-MB-231, were obtained from Karmanos Cancer Institute. All cells were cultured in DMEM/F12 media (Gibco, Md.) supplemented with 10 mM HEPES, 29 mM sodium bicarbonate, penicillin (100 units/ml) and streptomycin (100 μg/ml). In addition, 10% calf serum, 10 μg/ml insulin (Sigma Chemical, St Louis, Mo.), and 0.5 nM estradiol was used in MCF7 media and 10% fetal calf serum was used for MDA-MB 231. All flasks and plates were incubated in a humidified atmosphere of 95% air and 5% CO2 at 37° C.

[0525] BxPC-3 pancreatic carcinoma cell line was cultured in RPMI 1640 with 10% FBS.

[0526] NMuMG (normal mouse mammary gland cells) cell line was grown in DMEM media with 4.5 g/l glucose, 10 μg/ml insulin and 10% FBS.

[0527] All the above cells were seeded at 2,500 to 5,000 cells/well in 96 well plates. The cells were treated with oligonucleotide compounds in fresh media (100 μl total volume) 24 hours after seeding. The media was replaced with fresh media without oligonucleotides 24 hours after treatment and every 48 hours for 6 to 7 days or until the control cells were 80 to 100% confluent. The inhibitory effect of oligonucleotide was evaluated using an MTT staining technique.

Cell Growth Inhibition Assay (FIGS. 26, 50-53; Descriptions Referenced in U.S. Pat. No. 7,524,827)

[0528] Cell growth inhibition was assessed using 3-[4,5-Dimethyl-thiazol-2-yl]-2,5diphenyltetrazolium bromide (MTT) purchased from Sigma Chemical (St. Louis, Mo.). Cells were resuspended in culture media at 50,000 cells/ml and 100 μl was distributed into each well of a 96-well, flat bottomed plate (Costar Corning, N.Y., USA) and incubated for 24 hours. Media was changed to 100 μl fresh media containing the desired concentration of oligonucleotides and incubated for 24 hours. Controls had media with pure sterile water equal to the volume of oligonucleotide solution. The media was changed without further addition of oligonucleotides every 24 hours until the control cultures were confluent (6 to 7 days). Thereafter the media was removed and plates were washed two times with phosphate-buffered saline (PBS) and 100 μl of serum free media containing 0.5 mg/ml MTT dye was added into each well and incubated for 1 hour at 37° C. The media with dye was removed, washed with PBS and 100 μl of dimethyl sulfoxide (DMSO) was added to solubilize the reactive dye. The absorbance values were read using an automatic multiwell spectrophotometer (Bio-Tek Microplate Autoreader, Winooski, Vt., USA). Each treatment was repeated at least 3 times with 8 independent wells each time. Included in Tables 4 and 5 are the sequences for the control and negative control oligonucleotides used in the experiments.

[0529] C. Preparation and Formulation of Oligonucleotides

[0530] Any of the known methods of oligonucleotide synthesis can be used to prepare the modified oligonucleotides of the present invention. In some embodiments utilizing methylated oligonucleotides the nucleotide, dC is replaced by 5-methyl-dC where appropriate, as taught by the present invention. The modified or unmodified oligonucleotides of the present invention are most conveniently prepared by using any of the commercially available automated nucleic acid synthesizers. They can also be obtained from commercial sources that synthesize custom oligonucleotides pursuant to customer specifications.

[0531] While oligonucleotides are a preferred form of compound, the present invention comprehends other oligomeric oligonucleotide compounds, including but not limited to oligonucleotide mimetics such as are described below. The oligonucleotide compounds in accordance with this invention preferably comprise from about 20 to about 34 nucleobases (i.e., from about 20 to about 34 linked bases), although both longer and shorter sequences may find use with the present invention.

[0532] Specific examples of preferred compounds useful with the present invention include oligonucleotides containing modified backbones or non-natural internucleoside linkages. As defined in this specification, oligonucleotides having modified backbones include those that retain a phosphorus atom in the backbone and those that do not have a phosphorus atom in the backbone. For the purposes of this specification, modified oligonucleotides that do not have a phosphorus atom in their internucleoside backbone can also be considered to be oligonucleosides.

[0533] Preferred modified oligonucleotide backbones include, for example, phosphorothioates, chiral phosphorothioates, phosphorodithioates, phosphotriesters, aminoalkylphosphotriesters, methyl and other alkyl phosphonates including 3′-alkylene phosphonates and chiral phosphonates, phosphinates, phosphoramidates including 3′-amino phosphoramidate and aminoalkylphosphoramidates, thionophosphoramidates, thionoalkylphosphonates, thionoalkylphosphotriesters, and boranophosphates having normal 3′-5′ linkages, 2′-5′ linked analogs of these, and those having inverted polarity wherein the adjacent pairs of nucleoside units are linked 3′-5′ to 5′-3′ or 2′-5′ to 5′-2′. Various salts, mixed salts and free acid forms are also included.

[0534] Preferred modified oligonucleotide backbones that do not include a phosphorus atom therein have backbones that are formed by short chain alkyl or cycloalkyl internucleoside linkages, mixed heteroatom and alkyl or cycloalkyl internucleoside linkages, or one or more short chain heteroatomic or heterocyclic internucleoside linkages. These include those having morpholino linkages (formed in part from the sugar portion of a nucleoside); siloxane backbones; sulfide, sulfoxide and sulfone backbones; formacetyl and thioformacetyl backbones; methylene formacetyl and thioformacetyl backbones; alkene containing backbones; sulfamate backbones; methyleneimino and methylenehydrazino backbones; sulfonate and sulfonamide backbones; amide backbones; and others having mixed N, O, S and CH2 component parts.

[0535] In other preferred oligonucleotide mimetics, both the sugar and the internucleoside linkage (i.e., the backbone) of the nucleotide units are replaced with novel groups. The base units are maintained for hybridization with an appropriate nucleic acid target compound. One such oligomeric compound, an oligonucleotide mimetic that has been shown to have excellent hybridization properties, is referred to as a peptide nucleic acid (PNA). In PNA compounds, the sugar-backbone of an oligonucleotide is replaced with an amide containing backbone, in particular an aminoethylglycine backbone. The nucleobases are retained and are bound directly or indirectly to aza nitrogen atoms of the amide portion of the backbone. Representative United States patents that teach the preparation of PNA compounds include, but are not limited to, U.S. Pat. Nos. 5,539,082; 5,714,331; and 5,719,262, each of which is herein incorporated by reference. Further teaching of PNA compounds can be found in Nielsen et al., Science 254:1497 (1991).

[0536] In some embodiments, oligonucleotides of the invention are oligonucleotides with phosphorothioate backbones and oligonucleosides with heteroatom backbones, and in particular —CH2, —NH—O—CH2-, —CH2-N(CH3)-O—CH2- [known as a methylene (methylimino) or MMI backbone], —CH2-O—N(CH3)-CH2-, —CH2-N(CH3)-N(CH3)-CH2-, and —O—N(CH3)-CH2-CH2- [wherein the native phosphodiester backbone is represented as —O—P—O—CH2-] of the above referenced U.S. Pat. No. 5,489,677, and the amide backbones of the above referenced U.S. Pat. No. 5,602,240. Also preferred are oligonucleotides having morpholino backbone structures of the above-referenced U.S. Pat. No. 5,034,506.

[0537] Modified oligonucleotides may also contain one or more substituted sugar moieties. Preferred oligonucleotides comprise one of the following at the 2′ position: OH; F; O-, S-, or N-alkyl; O-, S-, or N-alkenyl; O-, S- or N-alkynyl; or O-alkyl-O-alkyl, wherein the alkyl, alkenyl and alkynyl may be substituted or unsubstituted C1 to C10 alkyl or C2 to C10 alkenyl and alkynyl. Particularly preferred are O[(CH2)nO]mCH3, O(CH2)nOCH3, O(CH2)nNH2, O(CH2)nCH3, O(CH2)nONH2, and O(CH2)nON[(CH2)nCH3)]2, where n and m are from 1 to about 10. Other preferred oligonucleotides comprise one of the following at the 2′ position: C1 to C10 lower alkyl, substituted lower alkyl, alkaryl, aralkyl, O-alkaryl or O-aralkyl, SH, SCH3, OCN, Cl, Br, CN, CF3, OCF3, SOCH3, SO2CH3, ONO2, NO2, N3, NH2, heterocycloalkyl, heterocycloalkaryl, aminoalkylamino, polyalkylamino, substituted silyl, an RNA cleaving group, a reporter group, an intercalator, a group for improving the pharmacokinetic properties of an oligonucleotide, or a group for improving the pharmacodynamic properties of an oligonucleotide, and other substituents having similar properties. A preferred modification includes 2′-methoxyethoxy (2′-O—CH2CH2OCH3, also known as 2′-O-(2-methoxyethyl) or 2′-MOE) (Martin et al., Helv. Chim. Acta 78:486 [1995]) i.e., an alkoxyalkoxy group. A further preferred modification includes 2′-dimethylaminooxyethoxy (i.e., a O(CH2)2ON(CH3)2 group), also known as 2′-DMAOE, and 2′-dimethylaminoethoxyethoxy (also known in the art as 2′-O-dimethylaminoethoxyethyl or 2′-DMAEOE), i.e., 2′-O—CH2-O—CH2-N(CH2)2.

[0538] Other preferred modifications include 2′-methoxy(2′-O—CH3), 2′-aminopropoxy(2′-OCH2CH2CH2NH2) and 2′-fluoro (2′-F). Similar modifications may also be made at other positions on the oligonucleotide, particularly the 3′ position of the sugar on the 3′ terminal nucleotide or in 2′-5′ linked oligonucleotides and the 5′ position of 5′ terminal nucleotide. Oligonucleotides may also have sugar mimetics such as cyclobutyl moieties in place of the pentofuranosyl sugar.

[0539] Oligonucleotides may also include nucleobase (often referred to in the art simply as “base”) modifications or substitutions. As used herein, “unmodified” or “natural” nucleobases include the purine bases adenine (A) and guanine (G), and the pyrimidine bases thymine (T), cytosine (C) and uracil (U). Modified nucleobases include other synthetic and natural nucleobases such as 5-methylcytosine (5-me-C), 5-hydroxymethyl cytosine, xanthine, hypoxanthine, 2-aminoadenine, 6-methyl and other alkyl derivatives of adenine and guanine, 2-propyl and other alkyl derivatives of adenine and guanine, 2-thiouracil, 2-thiothymine and 2-thiocytosine, 5-halouracil and cytosine, 5-propynyl uracil and cytosine, 6-azo uracil, cytosine and thymine, 5-uracil (pseudouracil), 4-thiouracil, 8-halo, 8-amino, 8-thiol, 8-thioalkyl, 8-hydroxyl and other 8-substituted adenines and guanines, 5-halo particularly 5-bromo, 5-trifluoromethyl and other 5-substituted uracils and cytosines, 7-methylguanine and 7-methyladenine, 8-azaguanine and 8-azaadenine, 7-deazaguanine and 7-deazaadenine and 3-deazaguanine and 3-deazaadenine. Further nucleobases include those disclosed in U.S. Pat. No. 3,687,808. Certain of these nucleobases are particularly useful for increasing the binding affinity of the oligomeric compounds of the invention. These include 5-substituted pyrimidines, 6-azapyrimidines and N-2, N-6 and O-6 substituted purines, including 2-aminopropyladenine, 5-propynyluracil and 5-propynylcytosine. 5-methylcytosine substitutions have been shown to increase nucleic acid duplex stability by 0.6-1.2° C. and are presently preferred base substitutions, even more particularly when combined with 2′-O-methoxyethyl sugar modifications.

[0540] Another modification of the oligonucleotides of the present invention involves chemically linking to the oligonucleotide one or more moieties or conjugates that enhance the activity, cellular distribution or cellular uptake of the oligonucleotide. Such moieties include but are not limited to lipid moieties such as a cholesterol moiety, cholic acid, a thioether, (e.g., hexyl-S-tritylthiol), a thiocholesterol, an aliphatic chain, (e.g., dodecandiol or undecyl residues), a phospholipid, (e.g., di-hexadecyl-rac-glycerol or triethylammonium 1,2-di-O-hexadecyl-rac-glycero-3-H-phosphonate), a polyamine or a polyethylene glycol chain or adamantane acetic acid, a palmityl moiety, or an octadecylamine or hexylamino-carbonyl-oxycholesterol moiety.

[0541] One skilled in the relevant art knows well how to generate oligonucleotides containing the above-described modifications. The present invention is not limited to the antisense oligonucleotides described above. Any suitable modification or substitution may be utilized.

[0542] It is not necessary for all positions in a given compound to be uniformly modified, and in fact more than one of the aforementioned modifications may be incorporated in a single compound or even at a single nucleoside within an oligonucleotide. The present invention also includes pharmaceutical compositions and formulations that include the antisense compounds of the present invention as described below.

[0543] D. Cocktails

[0544] In some embodiments, the present invention provides cocktails comprising two or more oligonucleotides directed towards promoter regions of genes (e.g., oncogenes). In some embodiments, the two oligonucleotides hybridize to different regions of the promoter of the same gene. In other embodiments, the two or more oligonucleotides hybridize to promoters of two different genes. The present invention is not limited to a particular mechanism. Indeed, an understanding of the mechanism is not necessary to practice the present invention. Nonetheless, it is contemplated that the combination of two or more compounds of the present invention provides an inhibition of cancer cell growth that is greater than the additive inhibition of each of the compounds administered separately.

### V. Research Uses

[0545] The present invention is not limited to therapeutic applications. For example, in some embodiments, the present invention provides compositions and methods for the use of oligonucleotides as a research tool.

[0546] A. Kits

[0547] For example, in some embodiments, the present invention provides kits comprising oligonucleotides specific for inhibition of a gene of interest, and optionally cell lines (e.g., cancer cells lines) known to express the gene. Such kits find use, for example, in the identification of metabolic pathways or the involvement of genes in disease (e.g., cancer), as well as in diagnostic applications. In some embodiments, the kits further comprise buffer and other necessary reagents, as well as instructions for using the kits.

[0548] B. Target Validation

[0549] In some embodiments, the present invention provides methods and compositions for use in the validation of gene targets (e.g., genes suspected of being involved in disease). For example, in some embodiments, the expression of genes identified in broad screening applications (e.g., gene expression arrays) as being involved in disease is downregulated using the methods and compositions of the present invention. The methods and compositions of the present invention are suitable for use in vitro and in vivo (e.g., in a non-human animal) for the purpose of target validation. In other embodiments, the compounds of the present invention find use in transplantation research (e.g., HLA inhibition).

[0550] C. Drug Screening

[0551] In other embodiments, the methods and compositions of the present invention are used in drug screening applications. For example, in some embodiments, oligonucleotides of the present invention are administered to a cell (e.g., in culture or in a non-human animal) in order to inhibit the expression of a gene of interest. In some embodiments, the inhibition of the gene of interest mimics a physiological or disease condition. In other embodiments, an oncogene or disease causing gene is inhibited. Test compounds (e.g., small molecule drugs or oligonucleotide mimetics) are then administered to the test cell and the effect of the test compounds is assayed.

[0552] The test compounds of the present invention can be obtained using any of the numerous approaches in combinatorial library methods known in the art, including biological libraries; peptoid libraries (libraries of molecules having the functionalities of peptides, but with a novel, non-peptide backbone, which are resistant to enzymatic degradation but which nevertheless remain bioactive; see, e.g., Zuckennann et al., J. Med. Chem. 37: 2678-85 [1994]); spatially addressable parallel solid phase or solution phase libraries; synthetic library methods requiring deconvolution; the ‘one-bead one-compound’ library method; and synthetic library methods using affinity chromatography selection. The biological library and peptoid library approaches are preferred for use with peptide libraries, while the other four approaches are applicable to peptide, non-peptide oligomer or small molecule libraries of compounds (Lam (1997) Anticancer Drug Des. 12:145).

[0553] Examples of methods for the synthesis of molecular libraries can be found in the art, for example in: DeWitt et al., Proc. Natl. Acad. Sci. U.S.A. 90:6909 [1993]; Erb et al., Proc. Nad. Acad. Sci. USA 91:11422 [1994]; Zuckermann et al., J. Med. Chem. 37:2678 [1994]; Cho et al., Science 261:1303 [1993]; Carrell et al., Angew. Chem. Int. Ed. Engl. 33.2059 [1994]; Carell et al., Angew. Chem. Int. Ed. Engl. 33:2061 [1994]; and Gallop et al., J. Med. Chem. 37:1233 [1994].

[0554] Libraries of compounds may be presented in solution (e.g., Houghten, Biotechniques 13:412-421 [1992]), or on beads (Lam, Nature 354:82-84 [1991]), chips (Fodor, Nature 364:555-556 [1993]), bacteria or spores (U.S. Pat. No. 5,223,409; herein incorporated by reference), plasmids (Cull et al., Proc. Nad. Acad. Sci. USA 89:18651869 [1992]) or on phage (Scott and Smith, Science 249:386-390 [1990]; Devlin Science 249:404-406 [1990]; Cwirla et al., Proc. NatI. Acad. Sci. 87:6378-6382 [1990]; Felici, J. Mol. Biol. 222:301 [1991]).

### VI. Compositions and Delivery

[0555] In some embodiments, the oligonucleotide compounds of the present invention are formulated as pharmaceutical compositions for delivery to a subject as a pharmaceutical. The novel antigen compounds of the present invention find use in the treatment of a variety of disease states and conditions in which it is desirable to inhibit the expression of a gene or the growth of a cell. In some preferred embodiments, the compounds are used to treat disease states resulting from uncontrolled cell growth, for example including, but not limited to, cancer. The present invention is not limited to the treatment of a particular cancer. The oligonucleotide compounds of the present invention are suitable for the treatment of a variety of cancers including, but not limited to, breast, colon, lung, stomach, pancreatic, bladder, leukemia, and lymphoma. In other preferred embodiments, the compounds are used to treat disease states resulting from gene expression, for example including, but not limited to, non cancer diseases. The below discussion provides exemplary, non-limiting examples of formulations and dosages.

[0556] A. Pharmaceutical Compositions

[0557] The present invention further provides pharmaceutical compositions (e.g., comprising the oligonucleotide compounds described above). The pharmaceutical compositions of the present invention may be administered in a number of ways depending upon whether local or systemic treatment is desired and upon the area to be treated. Administration may be topical (including ophthalmic and to mucous membranes including vaginal and rectal delivery), pulmonary (e.g., by inhalation or insufflation of powders or aerosols, including by nebulizer); intratracheal, intranasal, epidermal and transdermal), oral or parenteral. Parenteral administration includes intravenous, intraarterial, subcutaneous, intraperitoneal or intramuscular injection or infusion; or intracranial, e.g., intrathecal or intraventricular, administration.

[0558] Pharmaceutical compositions and formulations for topical administration may include transdermal patches, needless injectors, ointments, lotions, creams, gels, drops, suppositories, sprays, liquids and powders. Conventional pharmaceutical carriers, aqueous, powder or oily bases, thickeners and the like may be necessary or desirable.

[0559] Compositions and formulations for oral administration include powders or granules, suspensions or solutions in water or non-aqueous media, capsules, sachets or tablets. Thickeners, flavoring agents, diluents, emulsifiers, dispersing aids or binders may be desirable.

[0560] Compositions and formulations for parenteral, intrathecal or intraventricular administration may include sterile aqueous solutions that may also contain buffers, diluents and other suitable additives such as, but not limited to, penetration enhancers, carrier compounds and other pharmaceutically acceptable carriers or excipients.

[0561] Pharmaceutical compositions of the present invention include, but are not limited to, solutions, emulsions, nanoparticle, nanocrystal, and liposome-containing formulations. These compositions may be generated from a variety of components that include, but are not limited to, preformed liquids, self-emulsifying solids and self-emulsifying semisolids.

[0562] The pharmaceutical formulations of the present invention, which may conveniently be presented in unit dosage form, may be prepared according to conventional techniques well known in the pharmaceutical industry. Such techniques include the step of bringing into association the active ingredients with the pharmaceutical carrier(s) or excipient(s). In general the formulations are prepared by uniformly and intimately bringing into association the active ingredients with liquid carriers or finely divided solid carriers or both, and then, if necessary, shaping the product.

[0563] The compositions of the present invention may be formulated into any of many possible dosage forms such as, but not limited to, tablets, capsules, liquid syrups, soft gels, suppositories, and enemas. The compositions of the present invention may also be formulated as suspensions in aqueous, non-aqueous or mixed media. Aqueous suspensions may further contain substances that increase the viscosity of the suspension including, for example, sodium carboxymethylcellulose, sorbitol and/or dextran. The suspension may also contain stabilizers.

[0564] In one embodiment of the present invention the pharmaceutical compositions may be formulated and used as foams. Pharmaceutical foams include formulations such as, but not limited to, emulsions, microemulsions, creams, jellies and liposomes. While basically similar in nature these formulations vary in the components and the consistency of the final product.

[0565] Agents that enhance uptake of oligonucleotides at the cellular level may also be added to the pharmaceutical and other compositions of the present invention. For example, cationic lipids, such as lipofectin (U.S. Pat. No. 5,705,188), cationic glycerol derivatives, and polycationic molecules, such as polylysine (WO 97/30731), cochleates (Patent application numbers 20080242625 and 20120294901) also enhance the cellular uptake of oligonucleotides.

[0566] The compositions of the present invention may additionally contain other adjunct components conventionally found in pharmaceutical compositions. Thus, for example, the compositions may contain additional, compatible, pharmaceutically-active materials such as, for example, antipruritics, astringents, local anesthetics or anti-inflammatory agents, or may contain additional materials useful in physically formulating various dosage forms of the compositions of the present invention, such as dyes, flavoring agents, preservatives, antioxidants, opacifiers, thickening agents and stabilizers. However, such materials, when added, should not unduly interfere with the biological activities of the components of the compositions of the present invention. The formulations can be sterilized and, if desired, mixed with auxiliary agents, e.g., lubricants, preservatives, stabilizers, wetting agents, emulsifiers, salts for influencing osmotic pressure, buffers, colorings, flavorings and/or aromatic substances and the like which do not deleteriously interact with the nucleic acid(s) of the formulation.

[0567] Compositions and formulations for oral administration include powders or granules, microparticulates, nanoparticulates, suspensions or solutions in water or non-aqueous media, capsules, gel capsules, sachets, tablets or minitablets. Thickeners, flavoring agents, diluents, emulsifiers, dispersing aids or binders may be desirable. Preferred oral formulations are those in which oligonucleotides of the invention are administered in conjunction with one or more penetration enhancers surfactants and chelators. Preferred surfactants include fatty acids and/or esters or salts thereof, bile acids and/or salts thereof. Preferred bile acids/salts include chenodeoxycholic acid (CDCA) and ursodeoxychenodeoxycholic acid (UDCA), cholic acid, dehydrocholic acid, deoxycholic acid, glucholic acid, glycholic acid, glycodeoxycholic acid, taurocholic acid, taurodeoxycholic acid, sodium tauro-24,25-dihydro-fusidate, sodium glycodihydrofusidate. Preferred fatty acids include arachidonic acid, undecanoic acid, oleic acid, lauric acid, caprylic acid, capric acid, myristic acid, palmitic acid, stearic acid, linoleic acid, linolenic acid, dicaprate, tricaprate, monoolein, dilaurin, glyceryl 1-monocaprate, 1-dodecylazacycloheptan-2-one, an acylcarnitine, an acylcholine, or a monoglyceride, a diglyceride or a pharmaceutically acceptable salt thereof (e.g. sodium). Also preferred are combinations of penetration enhancers, for example, fatty acids/salts in combination with bile acids/salts. A particularly preferred combination is the sodium salt of lauric acid, capric acid and UDCA. Further penetration enhancers include polyoxyethylene-9-lauryl ether, polyoxyethylene-20-cetyl ether. Oligonucleotides of the invention may be delivered orally in granular form including sprayed dried particles, or complexed to form micro or nanoparticles or nanocrystals. Oligonucleotide complexing agents include poly-amino acids; polyimines; polyacrylates; polyalkylacrylates, polyoxethanes, polyalkylcyanoacrylates; cationized gelatins, albumins, starches, acrylates, polyethyleneglycols (PEG) and starches; polyalkylcyanoacrylates; DEAE-derivatized polyimines, pollulans, celluloses and starches. Particularly preferred complexing agents include chitosan, N-trimethylchitosan, poly-L-lysine, polyhistidine, polyornithine, polyspermines, protamine, polyvinylpyridine, polythiodiethylamino-methylethylene P(TDAE), polyaminostyrene (e.g. p-amino), poly(methylcyanoacrylate), poly(ethylcyanoacrylate), poly(butylcyanoacrylate), poly(isobutylcyanoacrylate), poly(isohexylcynaoacrylate), DEAE-methacrylate, DEAE-hexylacrylate, DEAE-acrylamide, DEAE-albumin and DEAE-dextran, polymethylacrylate, polyhexylacrylate, poly(D,L-lactic acid), poly(DL-lactic-co-glycolic acid (PLGA), alginate, phosphatidylserine, calcium, and polyethyleneglycol (PEG).

[0568] Certain embodiments of the invention provide pharmaceutical compositions containing (a) one or more oligonucleotide compounds and (b) one or more other chemotherapeutic agents that function by a non-oligonucleotide mechanism. Examples of such chemotherapeutic agents include, but are not limited to, cytotoxic agents, small molecule protein inhibitors, antibodies, and anti-sense anticancer drugs such as daunorubicin, dactinomycin, doxorubicin, bleomycin, mitomycin, nitrogen mustard, chlorambucil, melphalan, cyclophosphamide, 6-mercaptopurine, 6-thioguanine, cytarabine (CA), 5-fluorouracil (5-FU), floxuridine (5-FUdR), methotrexate (MTX), colchicine, vincristine, vinblastine, etoposide, teniposide, cisplatin, lenalomide, and diethylstilbestrol (DES). Anti-inflammatory drugs, including but not limited to nonsteroidal anti-inflammatory drugs and corticosteroids, and antiviral drugs, including but not limited to ribivirin, vidarabine, acyclovir and ganciclovir, may also be combined in compositions of the invention. Other non-oligonucleotide chemotherapeutic agents are also within the scope of this invention. Two or more combined compounds may be used together or sequentially.

[0569] B. Delivery

[0570] The oligonucleotide compounds of the present invention may be delivered using any suitable method. In some embodiments, naked DNA is administered. In other embodiments, lipofection is utilized for the delivery of nucleic acids to a subject. In still further embodiments, oligonucleotides are modified with phosphothioates for delivery (See e.g., U.S. Pat. No. 6,169,177, herein incorporated by reference).

[0571] In some embodiments, nucleic acids for delivery are compacted to aid in their uptake (See e.g., U.S. Pat. Nos. 6,008,366, 6,383,811 herein incorporated by reference). In some embodiment, compacted nucleic acids are targeted to a particular cell type (e.g., cancer cell) via a target cell binding moiety (See e.g., U.S. Pat. Nos. 5,844,107, 6,077,835, each of which is herein incorporated by reference).

[0572] In some embodiments, oligonucleotides are conjugated to other compounds to aid in their delivery. For example, in some embodiments, nucleic acids are conjugated to polyethylene glycol to aid in delivery (See e.g., U.S. Pat. Nos. 6,177,274, 6,287,591, 6,447,752, 6,447,753, and 6,440,743, each of which is herein incorporated by reference). In yet other embodiments, oligonucleotides are conjugated to protected graft copolymers, which are chargeable” drug nano-carriers (PharmaIn). In still further embodiments, the transport of oligonucleotides into cells is facilitated by conjugation to vitamins (Endocyte, Inc, West Lafayette, Ind.; See e.g., U.S. Pat. Nos. 5,108,921, 5,416,016, 5,635,382, 6,291,673 and WO 02/085908; each of which is herein incorporated by reference). In other embodiments, oligonucleotides are conjugated to nanoparticles (e.g., NanoMed Pharmaceuticals; Kalamazoo, Mich.).

[0573] In preferred embodiments, oligonucleotides are enclosed in lipids (e.g., liposomes or micelles) to aid in delivery (See e.g., U.S. Pat. Nos. 6,458,382, 6,429,200; each of which is herein incorporated by reference). Preferred liposomes include, but are not limited to amphoteric liposomes (e.g., SMARTICLES,). In still further embodiments, oligonucleotides are complexed with additional polymers to aid in delivery (See e.g., U.S. Pat. Nos. 6,379,966, 6,339,067, 5,744,335; each of which is herein incorporated by reference and Intradigm Corp., Rockville, Md.). Cochleates see e.g. Patent application number: 20080242625 and 20120294901.

[0574] In still further embodiments, the controlled high pressure delivery system developed by Mirus (Madison, Wis.) is utilized for delivery of oligonucleotides.

[0575] C. Dosages

[0576] Dosing is dependent on severity and responsiveness of the disease state to be treated, with the course of treatment lasting from several days to several months, or until a cure is effected or a diminution of the disease state is achieved. Optimal dosing schedules can be calculated from measurements of drug accumulation in the body of the patient. In some embodiments, the oligonucleotide is introduced to the host animal at a dosage of between 0.1 mg to 10 g, and preferably at a dosage of between 00.1 mg to 100 mg per kg of body weight or 1 to 300 mg per meter squared body surface area. The administering physician can determine optimum dosages, dosing methodologies and repetition rates. Optimum dosages may vary depending on the relative potency of individual oligonucleotides, and the delivery means, and can generally be estimated based on EC50s found to be effective in in vitro and in vivo animal models or based on the examples described herein. In general, dosage is from 10 mg to 10 g per kg of body weight, and may be given once or more daily, weekly, monthly or yearly. In some embodiments, dosage is continuous (e.g., intravenously) for a period of from several minutes to several days or weeks. In some embodiments, treatment is given for a defined period followed by a treatment free period. In some embodiments, the pattern of continuous dosing followed by a treatment free period is repeated several times (e.g., until the disease state is diminished).

[0577] The treating physician can estimate repetition rates for dosing based on measured residence times and concentrations of the drug in bodily fluids or tissues. Following successful treatment, it may be desirable to have the subject undergo maintenance therapy to prevent the recurrence of the disease state, wherein the oligonucleotide is administered in maintenance doses, ranging from 10 mg to 10 g, preferably from 1 mg to 5 mg, and even more preferably from 0.1 mg to 30 mg per kg of body weight or 0.1 mg/m² to 200 mg/m², once or more daily, to once every 20 years.

### VII. Customized Patient Care

[0578] In some embodiments, the present invention provides customized patient care.

[0579] The compositions of the present invention are targeted to specific genes unique to a patient's disease (e.g., cancer). For example, in some embodiments, a sample of the patient's cancer or other affected tissue (e.g., a biopsy) is first obtained. The biopsy is analyzed for the presence of expression of a particular gene (e.g., oncogene). In some preferred embodiments, the level of expression of an gene in a patient is analyzed. Expression may be detected by monitoring for the presence of RNA or DNA corresponding to a particular oncogene. Any suitable detection method may be utilized, including, but not limited to, those disclosed below. 5 10 15 20

[0580] Following the characterization of the gene expression pattern of a patient's gene of interest, a customized therapy is generated for each patient. In preferred embodiments, oligonucleotide compounds specific for genes that are aberrantly expressed in the patient (e.g., in a tumor) are combined in a treatment cocktail. In some embodiments, the treatment cocktail further includes additional chemotherapeutic agents (e.g., those described above). The cocktail is then administered to the patient as described above.

[0581] In some embodiments, the analysis of cancer samples and the selection of oligonucleotides for a treatment compound is automated. For example, in some embodiments, a software program that analyses the expression levels of a series of oncogenes to arrive at the optimum selection and concentration of oligonucleotides is utilized. In some embodiments, the analysis is performed by the clinical laboratory analyzing the patient sample and is transmitted to a second provider for formulation of the treatment cocktail. In some embodiments, the information is transmitted over the Internet, thus allowing for the shortest possible time in between diagnosis and the beginning of treatment.

[0582] A. Detection of RNA

[0583] In some embodiments, detection of oncogenes (e.g., including but not limited to, those disclosed herein) is detected by measuring the expression of corresponding mRNA in a tissue sample (e.g., cancer tissue or other biopsy). In other embodiments, expression of mRNA is measured in bodily fluids, including, but not limited to, blood, plasma, lymph, serum, mucus, and urine. In some preferred embodiments, the level of mRNA expression in measured quantitatively. RNA expression may be measured by any suitable method, including but not limited to, those disclosed below.

[0584] In some embodiments, RNA is detected by Northern blot analysis. Northern blot analysis involves the separation of RNA and hybridization of a complementary labeled probe. In other embodiments, RNA expression is detected by enzymatic cleavage of specific structures (INVADER assay, Third Wave Technologies; See e.g., U.S. Pat. Nos. 5,846,717, 6,090,543; 6,001,567; 5,985,557; and 5,994,069; each of which is herein incorporated by reference). The INVADER assay detects specific nucleic acid (e.g., RNA) sequences by using structure-specific enzymes to cleave a complex formed by the hybridization of overlapping oligonucleotide probes.

[0585] In still further embodiments, RNA (or corresponding cDNA) is detected by hybridization to a oligonucleotide probe). A variety of hybridization assays using a variety of technologies for hybridization and detection are available. For example, in some embodiments, TaqMan assay (PE Biosystems, Foster City, Calif.; See e.g., U.S. Pat. Nos. 5,962,233 and 5,538,848, each of which is herein incorporated by reference) is utilized. The assay is performed during a PCR reaction. The TaqMan assay exploits the 5′-3′ exonuclease activity of the AMPLITAQ GOLD DNA polymerase. A probe consisting of an oligonucleotide with a 5′-reporter dye (e.g., a fluorescent dye) and a 3′-quencher dye is included in the PCR reaction. During PCR, if the probe is bound to its target, the 5′-3′ nucleolytic activity of the AMPLITAQ GOLD polymerase cleaves the probe between the reporter and the quencher dye. The separation of the reporter dye from the quencher dye results in an increase of fluorescence. The signal accumulates with each cycle of PCR and can be monitored with a fluorimeter.

[0586] In yet other embodiments, reverse-transcriptase PCR (RT-PCR) is used to detect the expression of RNA. In RT-PCR, RNA is enzymatically converted to complementary DNA or “cDNA” using a reverse transcriptase enzyme. The cDNA is then used as a template for a PCR reaction. PCR products can be detected by any suitable method, including but not limited to, gel electrophoresis and staining with a DNA specific stain or hybridization to a labeled probe. In some embodiments, the quantitative reverse transcriptase PCR with standardized mixtures of competitive templates method described in U.S. Pat. Nos. 5,639,606, 5,643,765, and 5,876,978 (each of which is herein incorporated by reference) is utilized.

[0587] In yet other embodiments, mRNA or transcript numbers are measured using branched DNA technology (e.g. QuantiGene). Branched DNA (bDNA) quantitatively measures gene expression by a sandwich nucleic acid hybridization method that uses bDNA probes specific to the target RNA. The signal from captured target RNA is amplified and enhances assay sensitivity thereby eliminating the need to amplify target RNA by traditional PCR-based gene expression techniques. Furthermore, bDNA assays measure RNA directly from the sample source, without RNA purification or enzymatic manipulation, potentially avoiding inefficiencies and variability introduced by errors inherent to these processes.

[0588] B. Detection of Protein

[0589] In other embodiments, gene expression of oncogenes is detected by measuring the expression of the corresponding protein or polypeptide. In some embodiments, protein expression is detected in a tissue sample. In other embodiments, protein expression is detected in bodily fluids. In some embodiments, the level of protein expression is quantitated. Protein expression may be detected by any suitable method. In some embodiments, proteins are detected by their binding to an antibody raised against the protein. The generation of antibodies is well known to those skilled in the art.

[0590] Antibody binding is detected by techniques known in the art (e.g., radioimmunoassay, ELISA (enzyme-linked immunosorbant assay), “sandwich” immunoassays, immunoradiometric assays, gel diffusion precipitation reactions, immunodiffusion assays, in situ immunoassays (e.g., using colloidal gold, enzyme or radioisotope labels, for example), Western blots, precipitation reactions, agglutination assays (e.g., gel agglutination assays, hemagglutination assays, etc.), complement fixation assays, immunofluorescence assays, protein A assays, and immunoelectrophoresis assays, etc.

[0591] In one embodiment, antibody binding is detected by detecting a label on the primary antibody. In another embodiment, the primary antibody is detected by detecting binding of a secondary antibody or reagent to the primary antibody. In a further embodiment, the secondary antibody is labeled. Many methods are known in the art for detecting binding in an immunoassay and are within the scope of the present invention.

[0592] In some embodiments, an automated detection assay is utilized. Methods for the automation of immunoassays include those described in U.S. Pat. Nos. 5,885,530, 4,981,785, 6,159,750, and 5,358,691, each of which is herein incorporated by reference. In some embodiments, the analysis and presentation of results is also automated. For example, in some embodiments, software that generates an expression profile based on the presence or absence of a series of proteins corresponding to oncogenes is utilized.

[0593] In other embodiments, the immunoassay described in U.S. Pat. Nos. 5,599,677 and 5,672,480; each of which is herein incorporated by reference.

### VIII Listing of DNAi Sequences

[0594] The following sequences in Table 3 are provided as additional non-limiting examples of preferred embodiments of the invention.

TABLE 3
New DNAi Sequences

| | | | | Location |
|---|---|---|---|---|
| | | | | relative to 5′ |
| | | | | upstream |
| | | | | region from |
| | Design | Sequence | | gene start |
| Target | ID | ID No: | Sequence (5′-3′) | site |
| Survivin | SU1 | 1 | GAGCGCACGCCCTCTTAGGCGG | 73 |
| Survivin | SU2 | 75 | CACCCCGAGGTACGATCAGTGCGTACC | 2990 |
| Survivin | SU1_02 | 155 | GAGCGCACGCCCTCTTAGGCG | 73 |
| Survivin | SU1_03 | 229 | GAGCGCACGCCCTCTTAGGCGGTCCA | 73 |
| Survivin | | 303 | GTCGCCCCTGGGTCCTGCTGATTGGC | 1918 |
| Survivin | | 322 | CAGCGAGCCTGGGCCCCATCGGCACATCT | 2905 |
| Survivin | | 357 | CCCGCGGCCTTCTGGGAGTAGAGGC | 102 |
| Survivin | | 431 | TCCCGGCGAGTACATCGTTGACTGCACG | 675 |
| Survivin | | 481 | AACCTCCTCCCCGCCACGGGTT | 1229 |
| Beclin-1 | BE1 | 515 | CGACGCCCTTGACCTCCGGCCCGGGGT | 39 |
| Beclin-1 | BE2 | 550 | CTGCGCCGTTCCCTCTAGGAATGG | 111 |
| Beclin-1 | | 572 | GAAGCGACGCCCTTGACCTCCGGCCCGG | 35 |
| Beclin-1 | | 607 | CCCCCGATGCTCTTCACCTCGGG | 261 |
| Beclin-1 | | 712 | CGGGTCGGCCCCGGAGCGAGGCC | 335 |
| Beclin-1 | | 817 | GCCCGGCAGCGGCCCCCAGAGGCCG | 475 |
| Beclin-1 | | 847 | CGGTCTACCGCGGAGGCACTGTGGCCTCGG | 308 |
| Beclin-1 | | 952 | ACAAAAACTAGCCGGGCGTGGTGGGGCACGCC | 735 |
| STAT3 | ST1 | 984 | GGCCGAGGCACGCCGTCATGCA | −18 |
| STAT3 | ST2 | 985 | CCGGCCCTTGGCACCACGTGGTGGCGA | 345 |
| STAT3 | | 986 | TTGTTCCCTCGGCTGCGACGTCG | −135 |
| STAT3 | | 987 | CAGTCTGCGCCGCCGCAGCTCCGG | −92 |
| STAT3 | | 988 | CAGTGCGTGTGCGGTACAGCCG | 45 |
| STAT3 | | 989 | TGTGCTGGCTGTTCCGACAGTTCGGT | 140 |
| STAT3 | | 990 | TAACTACGCTATCCCGTGCGGCC | 1998449 |
| STAT3 | | 991 | TCGCCCAGCCCCAGCCTGGCCGAGGC | −35 |
| HIF1A | HI1 | 992 | CAGGCCGGCGCGCGCTCCCGCAA | 390 |
| HIF1A | HI2 | 1048 | GGACGGGCTGCGACGCTCACGTGC | 539 |
| HIF1A | | 1090 | GAGGTGGGGGTGCGAGGCGGGAAACCCCTCG | 108 |
| HIF1A | | 1129 | CAATCGCCGGGGTCCGGGCCCGGC | 162 |
| HIF1A | | 1130 | TGGCCGAAGCGACGAAGAGGG | 232 |
| HIF1A | | 1142 | GGGCGGAGGCGCGCTCGGGCGCG | 325 |
| HIF1A | | 1214 | CACGGCGGGCGGCCCCCAGGCTCGC | 26 |
| HIF1A | | 1270 | CAGGCCGGCGCGCGCTCCCGCAAGCCCG | 390 |
| HIF1A | | 13680 | CGATTGCCGCCCAACTCTGCTGGG | 789 |
| IL-8 | IL8-1 | 1314 | ACGTCCCATTCGGCTCCTGAGCCA | 2868 |
| IL-8 | IL8-3 | 1331 | GACGTTGACGAAGTCTATCACCCAA | 2939 |
| IL-8 | | 1341 | ACGGAGTATGACGAAAGTTTTC | 257 |
| IL-8 | | 1342 | GAGCGAGACTCCCGTCTAAA | 3259 |
| KRAS | | 1535 | GCCGGGCCGGCTGGAGAGCGGGTC | 5803 |
| KRAS | | 1538 | TCGCCCCTCCTCCGAGACTTTC | 6626 |
| KRAS | | 1584 | GCACCCCGCCACCCTCAGGGTCGGC | 6029 |
| KRAS | | 1633 | GAGCCGCCGCCACCTTCGCCGCCGC | 5475 |
| KRAS | | 1697 | CGGCATAGTTCCCCGCCTTAC | 2002 |
| KRAS | KR16 | 1730 | CGGCCCGAGCCTCCGTGACGAGTGC | 146348 |
| KRAS | KR17 | 1767 | CTGGGAGGGGATCCCTCACCGAGAG | 3328 |
| MTTP | | 1784 | AACCGCCGTAGCCTCCACTGCG | 28 |
| MTTP | | 1870 | TGGCCGCAGTTCGATGACGTAAGACG | 1 |
| ApoC-III | | 1956 | GAGTCGGTGGTCCAGGAGGGGCCGC | 939 |
| ApoC-III | | 1957 | CTGCGGCTGAGGTGTCATTCGTGACTCAG | 3539 |
| ApoC-III | | 1992 | GCGGGCGGGTGAGACAGAAGCGCC | 3455 |
| ApoC-III | | 1993 | CCTCGCGAGCGTGGGTGCACGC | 3310 |
| ApoC-III | | 2028 | CGATGTCTCCCTCGAGATCACA | 3042 |
| ApoC-III | | 2054 | GGACGGACGGATATCTGAGGCCAG | 1520 |
| ApoC-III | | 2062 | CGTCCCCGCCACGTTGAAAGGC | 3279 |
| ApoC-III | | 2089 | TCTCGGACATGCTCAAATGGTGCAGGCG | 3405 |
| ApoC-III | | 2108 | CACCGACAGGAGCCAATAGTGCAACG | 4201 |
| ApoC-III | | 2127 | GTCCGGCAGAGGGACCCATGCTGACG | 4265 |
| ApoC-III | | 2136 | CGTGAGGCACATGTCCGTGTG | 2836 |
| ApoC-III | | 2170 | CAGATGCAGCAAGCGGGCGGGAGAG | 123 |
| ApoC-III | | 2176 | CCACGCTGCTGTCCCGCCAGCCCTGCAG | 173 |
| ApoC-III | | 2206 | ACCCGCCCCCACCCTGTGTGCCCCC | 601 |
| ApoC-III | | 2225 | CGCTCAGAGCCCGAGGCCTTTG | 677 |
| ApoB | | 2252 | CGGTGGGGCGGCTCCTGGGCTGC | 10 |
| ApoB | | 2329 | CCTCGCGGCCCTGGCTGGCTGGGCG | 46 |
| ApoB | | 2406 | AACCGAGAAGGGCACTCAGCCCCG | 88 |
| ApoB | | 2440 | CGGCGCCCGCACCCCATTTATAGG | 136 |
| ApoB | | 2451 | GTCCAAAGGGCGCCTCCCGGGCC | 195 |
| ApoB | | 2475 | CGTCTTCAGTGCTCTGGCGCGGCC | 341 |
| ApoB | | 2513 | CACCGGAAGCTTCAGCCAGCGCTCGCTG | 988 |
| ApoB | | 2552 | CGAGTGGGAGGCGGCCAGGAGCAAGCCG | 1281 |
| ApoB | | 2553 | CGTACACTCACGGAAATGCTGTAAAG | 2533 |
| ApoB | | 2576 | CGTCACAGCCAATAATGAGCGTACGC | 4862 |
| IL17 | | 2601 | CTTGTTTGTATCCGCATGGCTGTGCTC | 4451 |
| IL17 | | 2616 | CGAGACCGTTGAGGTGGAGTG | 3148 |
| IL17 | | 2635 | GGTCACTTACGTGGCGTGTCGC | 107 |
| IL17 | | 2664 | GACAAAATGTAGCGCTATCG | 55 |
| MMP2 | | 2666 | GCTCCCTGGCCCCGCGCGTCGC | 9 |
| MMP2 | | 2732 | CCGCGGCGCAGGGCTGCGCTCCGAG | 85 |
| MMP2 | | 2865 | GCCGCCTGCTACTCCTGGCCTC | 453 |
| MMP2 | | 2869 | GCGCACTCGGGCCCGCCCCTCTCTGCCC | 361 |
| MMP2 | | 2891 | CGCTCCGAGGGTCCGCTGGCTCGG | 101 |
| MMP2 | | 3024 | GTCCACCCTCAGTGCACGACCTCGT | 478 |
| MMP2 | | 3066 | CACCGCCTGAGGAAGTCTGGATGC | 239 |
| MMP2 | | 3101 | TGCCTCTCTCGCGATCTGGGCG | 512 |
| MMP2 | | 3131 | GAGGGACGCCGGCTTGGCTAGGAC | 618 |
| FAP | | 3154 | CAGAGCGTGGGTCACTGGATCT | 39 |
| FAP | | 3171 | CACCAACATCTGCTTACGTTGAC | 272 |
| FAP | | 3177 | TCCACGGACTTTTGAATACCGTGC | 133 |
| P-selectin | | 3184 | TAGCTACGAATAAAGAAATTTGTAG | 2694 |
| IL6 | | 3185 | CACCGCGTGGCTTCTGCCACTTTC | 723 |
| IL6 | | 3206 | TACGGACGCAGGCACGGCTCTAG | 1117 |
| IL6 | | 3226 | CAGCTCCGCAGCCGTGCACTGTG | 1722 |
| IL6 | | 3255 | CTTCACCGATTGTCTAAACAGAGAC | 1525 |
| IL6 | IL6_1 | 3256 | TTCGTTCCCGGTGGGCTCGAGGGC | 35 |
| IL6 | | 3276 | TGCTTCCGCGTCGGCACCCAAG | 1150 |
| IL23 | | 3300 | TCCCTGCATTGTAAGGCCCGCC | 195 |
| IL23 | | 3319 | CACAGCGGGGATGGGGTGGGAGGG | 414 |
| IL23 | | 3320 | GACGTCAGAATGAGGCCATCG | 1296 |
| IL23 | | 3341 | GAGCCAGCACGGTGGTGGGCGCC | 1651 |
| IL23 | | 3365 | GCGTTTGTCCCACCGGCGCCCCG | 4861 |
| IL23 | | 3479 | TAACGCCACCCAACAAGTCCGGCG | 4830 |
| AKT1 | | 3593 | GAGGCTCCCGCGACGCTCACGCG | 8 |
| AKT1 | | 3646 | TACCGGGCGTCTCAGGTTTTGCC | 843 |
| AKT1 | | 3669 | TCCGAGCCGCGCACGCCTCAGGC | 1562 |
| AKT1 | | 3703 | CACCAACGGACTCCGTCCGCCC | 2010 |
| AKT1 | | 3770 | CCGCCGGCTGCCTCGCTGGCCCAGCG | 2464 |
| AKT1 | | 3927 | TCTCGGGTCCCGGCCTCGCCCGGCGGAGC | 2556 |
| AKT1 | | 4084 | CATTCTGGCGGCGCCGCGGCTCGCG | 2730 |
| AKT1 | | 4228 | CACCGGGCCGCCGCGTCCGGGCGCG | 2838 |
| AKT1 | AKT4 | 4338 | CACATCCGCCTCCGCCGCCCGG | 3160 |
| CRAF | | 4339 | GCGCGAGCCCTACTGGCAGTCG | 390 |
| CRAF | | 4462 | CGGGGCGTGGCCTAGCGATCTGGTGGCCG | 467 |
| CRAF | | 4517 | TTTCGAAGCTGAAGAGGTTAGGCGACG | 499 |
| CRAF | | 4519 | CGACGCTGACTTGCTTTCAGGAG | 521 |
| CRAF | | 4533 | AATCGAGAAGAACCGGCTTTCGG | 555 |
| CRAF | | 4556 | CTTTGACGCGTCCTCTCCGGGC | 689 |
| CRAF | | 4585 | CGGCTCCGCCACTTGACAGCTATGTGG | 728 |
| CRAF | | 4605 | AGGCGGAGATTGCGGTGAGCCGAAATCGCG | 1582 |
| CRAF | | 4609 | AGGCCGCCCCAACGTCCTGTCGTTCGGCGG | 12 |
| CRAF | | 4677 | TCTCGCCCGCTCCTCCTCCCCGCGGCGGGTG | 47 |
| CRAF | | 4745 | CGGGAGGCGGTCACATTCGGCGCG | 84 |
| CRAF | | 4782 | CGGAGCCCCGAGCAGCCCCCGCATCG | 124 |
| CRAF | | 4871 | CGCGCTCCGCGCCTCAGGGCACGCGCC | 157 |
| CRAF | | 4960 | AGCCGTTCCCGCCTCACAATCG | 234 |
| CRAF | | 4984 | CCGCCATCTAAGATGGCGGCC | 270 |
| CRAF | | 5047 | CGGGCGGCCCAGACGAGCGAGCCCTCG | 314 |
| CRAF | | 5110 | CGTCCTCCCGACCTGCGACGCCACCGGC | 351 |
| Beta- | | 5233 | CGCATATTACTGGGTAAACTCTGTG | 1411 |
| catenin | | | | |
| Beta- | | 5234 | CACGCTGGATTTTCAAAACAGTTG | 5 |
| catenin | | | | |
| PCSK9 | | 5235 | CAGGGCGCGTGAAGGGGCGCGCGG | 120 |
| PCSK9 | | 5236 | GACGCGTCCCGGCCCGCCCGAGC | 179 |
| PCSK9 | | 5285 | GACGCCTGGGGCGCGCAGATCAC | 341 |
| PCSK9 | | 5341 | CAGGCCGGCGCCCTAGGGGCTCC | 494 |
| PCSK9 | | 5359 | CACGCCGGCGGCGCCTTGAGCC | 56 |
| PCSK9 | | 5402 | CAGGTTTCGGCCTCGCCCTCCC | 408 |
| PCSK9 | | 5445 | CATCGAGCCCGCCATCGCAGCAC | 1307 |
| PCSK9 | | 5473 | GAGCGCCTCGACGTCGCTGCGGAAACC | 273 |
| MEK1 | | 5534 | CAAGTCCGGGCCGCGGGCCCCGGGGC | 93 |
| MEK1 | MEK1_2 | 5716 | GCGCCCCGCGCGGTCCCGTCAGCGC | 133 |
| MEK1 | | 5898 | GCGGAGCGGGCTGAACGTGCG | 249 |
| MEK1 | | 5900 | GACTGGAGGCCGGGGGAGGGGCGGGG | 433 |
| MEK1 | | 5901 | GACCCGGGTAACGCGCTTCCAAC | 5 |
| MEK1 | MEK1_1 | 5924 | CACTCGGCTCCGCCCCTATTGC | 507 |
| MEK1 | | 6000 | TACGTCACGGGAGCGCGGCGCAC | 578 |
| MEK1 | | 6077 | GTCGCGGACGCCGTGGCGCCCTCTGTC | 619 |
| MEK1 | | 6154 | CACTCGCCGTCATGCCCGGATCC | 1183 |
| MEK2 | | 6182 | CGCCGCAGCCCGAGTCCGAGAGG | 226 |
| MEK2 | | 6202 | GAGGGGCGCTGGGGCTGAGGCGAGCG | 165 |
| MEK2 | | 6203 | CTCGCGATAACGGGATCGGGAGCCGCG | 290 |
| MEK2 | MEK2_1 | 6235 | CCGACGCGAGGCGGTGCCGGGACCGG | 391 |
| MEK2 | | 6240 | CACGGCGCGTGTGCCCAAGCGC | 436 |
| MEK2 | | 6299 | CGTGGACACACGCCCCTAGCCC | 643 |
| MEK2 | | 6341 | TAGACACTTCGGTGAATCGTGCCGC | 1622 |
| CD4 | | 6373 | GAGCCACTGCGCCCGGCCTCATTAAGGGCAT | 1818 |
| CD4 | | 6406 | CGAACAACTTCATTACAATTCGACAAGCGC | 2632 |
| CD4 | | 6407 | CGTAGTTAAGCGTGTACCAGCCCAAGGC | 2522 |
| CD4 | | 6421 | GAGCGGTGACCGTGTCTGTCTTAG | 3084 |
| CD4 | | 6447 | CGGTTTGCAGATTCCAGACCCGATGGACG | 4433 |
| WNT1 | | 6466 | CGCGCGCCCGCCTCACTCAGCTGAGCG | 442 |
| WNT1 | | 6537 | CGTCATTCTGTTGCCCTTTGTACCTCG | 1226 |
| WNT1 | | 6545 | CGCCACGGGCGCATCCATCCCTCCTGGG | 4454 |
| WNT1 | | 6579 | CACCGCCCTCTAGCCGCCTGCGGG | 4960 |
| WNT1 | | 6580 | TTGCGGCGACTTTGGTTGTTGCCCGCGACGGT | 34 |
| Clusterin | | 6636 | CGTCCCGCCCACCTGCTGCCTGCAGCAG | 78 |
| Clusterin | | 6660 | CGACAATCAGCGAGGCACACAGGCT | 330 |
| Clusterin | | 6689 | CGGAGAGTAGAGAGGGTTCGCAGTGGCCC | 718 |
| Clusterin | | 6690 | CCACGGGGCACAGGCCATAGCCCCG | 890 |
| Clusterin | | 6709 | CTCGTGCTCTCAGGCGGCGGTTGCGCCG | 3865 |
| Clusterin | | 6752 | CCGGGAGGTGGGGGCCGGTGCAGCACCGG | 4260 |
| Clusterin | | 6753 | TCGCGTGCCCATCTGGGAGCCCCTCTCACG | 4395 |
| NRAS | | 6774 | CCCCGCCCTCAGCCTAAGCAATGGA | 234 |
| NRAS | | 6793 | GACCCCGGAACCGCCATGAACAGCCC | 559 |
| NRAS | | 6818 | CCCGCTACGTAATCAGTCGGCGCCCCA | 613 |
| NRAS | | 6961 | AACGCAAAAACACCGGATTAATATCGGCCT | 142 |
| NRAS | | 6963 | ATAAACGGCCTCTTTACCCAGAGATCA | 850 |
| NRAS | | 6971 | CGCCACCTTAAGTTTTTCCAGGCTGC | 1779 |
| EZH2 | EZH2_2 | 6986 | TCCCGACAAGGGGTGACAGAGGC | 1002 |
| EZH2 | | 7002 | CGTGAATTCAAGAGTTGCTTAGGCC | 1059 |
| EZH2 | | 7003 | GACTACCGGTGCCCGCCACCACGCCAGGC | 2856 |
| EZH2 | | 7035 | GACCGCCCCCCGCCAACCCCACAGCGG | 3459 |
| HDAC1 | | 7075 | CGCCTCCCGTCCCTACCGTCAGTCGGT | 7 |
| HDAC1 | | 7141 | CGGTCCGTCCGCCCTCCCGCCCGCGG | 30 |
| HDAC1 | | 7207 | CGCCAACTTGTGGTCCTACAGTCAACAAG | 1740 |
| HDAC1 | | 7226 | CGCAGACACGGGCCCGGAACTCGG | 173 |
| HDAC1 | | 7258 | CGCCCGGCCTAGGAGGGCAGGTTTCTC | 1252 |
| PD-1 | | 7297 | TGCCGCCTTCTCCACTGCTCAGGCG | 23 |
| PD-1 | | 7316 | ACCGCCTGACAGCTGGCGCGGCTGCCTGGC | 1061 |
| PD-1 | PD1 | 7379 | CTGCGAGGCGCGGCCACGGCG | 1171 |
| PD-1 | | 7396 | CGAGGAGGAAAGGCAGGCGGAGTCCG | 3395 |
| PD-1 | | 7397 | CAGCGAAGCTGCAGAACGTCCCCATCACCACG | 4268 |
| PD-1 | | 7439 | CGACAGCCGTGGGAAGGTGCAGTACG | 4388 |
| PD-1 | | 7440 | CGGGATTCCCTGGAGATGCCTCCAGCGCG | 4422 |
| PD-1 | | 7466 | AGGCGGTCCCAGGGCTCAGGTGTGGG | 2229 |
| PD-1 | | 7498 | GCGTGCACCCCGTGGCCAGCTC | 3813 |
| PD-1 | | 7526 | CAACGTACACGCAATCCACAAC | 2832 |
| TNFa | | 10095 | CGGGGAAAGAATCATTCAACCAGCGG | 254 |
| TNFa | TNF1 | 10096 | CGGTTTCTTCTCCATCGCGGGGGCG | 350 |
| TNFa | | 10129 | CTGCTCCGATTCCGAGGGGGGTCTTCT | 438 |
| TNFa | | 10154 | CTCCGTGTGGGGCTCTGGTCGGCAGCT | 1490 |
| TNFa | | 10207 | CGCAGCCCCGTGGTACATCGAGTGCAGC | 2178 |
| MIF1 | | 12470 | GACCCGCGCAGAGGCACAGACGC | 42 |
| MIF1 | | 12490 | CGCCACCGCCGGCGCCAGGCCCCGCCCCCGCG | 143 |
| MIF1 | | 12701 | CGTTCCTCCAGCAACCGCCGCTAAGCCCGGCG | 258 |
| MIF1 | | 12912 | CGCCTGCCTCGGCTCGACCCCCGCAG | 202 |
| MIF1 | | 13123 | CGGCTAGAAATCGGCCTGTTCCGGCCTCGCCT | 317 |
| MIF1 | | 13174 | CGGGGGTGGGGATGCGGCGGTGAACCCG | 404 |
| MIF1 | | 13175 | CGCGGCAGGTGAGAGGGGAGCTGCCCCTGCG | 588 |
| MIF1 | | 13176 | CGCGTGCACGTGTGTCCACATGAGTGC | 3676 |
| MIF1 | MIF1_1 | 13203 | CGCCACCGCCGGCGCCAGGCCCCGCC | 137 |
| MIF1 | MIF1_2 | 13414 | CGCGGCAGGTGAGAGGGGAGCTGCCC | 583 |
| TTR | | 11359 | CAACGCCCTGGCTCGAGTGCAGTGGCACG | 803 |
| TTR | | 11432 | CTACTATCTCAGATACTCGGCCAACTCG | 1776 |
| TTR | | 11450 | CACGCGTTTCAGCACTGCACCCTGTTG | 2112 |
| HBV | | 9179 | CCGATTGGTGGAGGCAGGAGGAGG | 72 |
| HBV | | 9180 | CGAGATTGAGATCTTCTGCGACGCGG | 780 |
| HBV | | 9235 | CGCGGCGATTGAGACCTTCGTC | 801 |
| HBV | | 9290 | CGTCTGCGAGGCGAGGGAGTTCTTCT | 819 |
| HBV | | 9345 | CGATACAGAGCAGAGGCGGTGT | 1200 |
| HBV | | 9346 | CGCGTAAAGAGAGGTGCGCCCCGTGG | 1674 |
| HBV | | 9360 | ACGGGTCGTCCGCGGGATTCAGCGCCG | 1754 |
| HBV | | 9409 | CGTCCCGCGCAGGATCCAGTTGG | 1800 |
| HBV | | 9432 | CGGCTGCGAGCAAAACAAGCTGCTAG | 1909 |
| HBV | | 9468 | CGCATGCGCCGATGGCCTATGGCCAA | 1978 |
| HBV | | 9496 | CGCCGCAGACACATCCAGCGATA | 2826 |
| HBV | | 9525 | GCTCCAGACCGGCTGCGA | 1900 |
| HBV | | 9561 | CGTCCATCGCAGGATCCAGTTGG | 1800 |
| HBV | | 9562 | CGCCGCAGACACATCCAGCGATA | 2826 |
| HBV | | 9591 | CAAATGGCACTAGTAAACTGAG | 2524 |
| HBV | | 9592 | GAGATTGAGATCTGCGGCGACGCGG | 780 |
| HBV | | 9593 | CGACGCGGCGATTGAGATCTTCGTCTG | 801 |
| HBV | | 9594 | AGGGGTCGTCCGCGGGATTCAGCGCCG | 1754 |
| HAMP | | 8999 | CGTGCCGTCTGTCTGGCTGTCCCAC | 1 |
| HAMP | | 9005 | CGAGTGACAGTCGCTTTTATGGGGC | 60 |
| HAMP | | 9035 | CGGGGCATGGCCAGCAGCCGCCAGG | 424 |
| HAMP | | 9086 | CGTGTGCCCGATCCGCACGTGGTGT | 563 |
| HAMP | | 9121 | CGACAGGCTGACGGGCCAAGCTTGG | 2344 |
| HAMP | | 9150 | CGGATGGGCAGGGAGGATACCGTTT | 3109 |
| HAMP | | 9151 | CGTGGGCGGCGGCGGCTGCGTGGTG | 3287 |
| ERBB2 | | 13415 | CGGGAAGAGGATGCGCTGACCTGGC | 2571 |
| ERBB2 | | 13416 | CACGCCCTGGGGAGGAGGCTCGAGAGG | 3267 |
| ERBB2 | | 13437 | CGAGAGGGGCCGAGCCTCTGAAAAA | 3287 |
| ERBB2 | | 13452 | CGTCTGGTCCACAGTCCGATGTCCA | 3944 |
| PARP1 | | 9595 | CCGCCAAAGCTCCGGAAGCCCGACGCC | 14 |
| PARP1 | | 9741 | CCGCCTCGCCGCCTCGCGTGCGCTC | 60 |
| PARP1 | | 9887 | CGGGAACGCCCACGGAACCCGCGTC | 177 |
| PARP1 | | 9933 | CGGGTGGAGCTCTGCGGGCCGCTGC | 269 |
| PARP1 | | 9992 | CGCCGGCCCCAAACTCTTAAGTGTG | 696 |
| PARP1 | | 10014 | CGGGAAGCGCAGGCCCCCGCCTCGG | 749 |
| PARP1 | | 10045 | CGTTCTAACCTGCCGTCCACAGACC | 839 |
| ITGA4 | | 10244 | GCGCTCTCGGTGGGGAACATTCAACAC | 1 |
| ITGA4 | | 10252 | CGGGATGCGACGGTTGGCCAACGG | 54 |
| ITGA4 | | 10278 | CGCAGCGTGTCCGGCGCCAGCGGGC | 102 |
| ITGA4 | | 10299 | CGGCCCACCGCGGGCGGAGCGTTCG | 160 |
| ITGA4 | | 10449 | CGCGCACTCGCCCGGCCCCACTCCCG | 201 |
| ITGA4 | | 10599 | CGCCAGCCGGGAGCTTCGGGTGCTCGCG | 235 |
| ITGA4 | | 10749 | CGGGTACGGGCCGCTGGGTGGGGTCCCG | 272 |
| ITGA4 | | 10899 | GTGCGGAGGCGCAGGGCCGGGCTCCG | 306 |
| ITGA4 | | 10900 | CTACGCGCGGCTGCAGGGGGCGC | 339 |
| ITGA4 | | 10938 | CTGCGCAGGACTCGCGTCCTGGCCCG | 375 |
| ITGA4 | | 11009 | CCCGCAGAGCGCGGGATGGCTC | 411 |
| ITGA4 | | 11080 | CGGACCTGATGGGGCACGGGCTTCCCC | 448 |
| ITGA4 | | 11117 | CGGTGGTTGGGGCCTAGAAGCG | 481 |
| ITGA4 | | 11154 | CGCGCCCCTCGCTGTGACCGCCCAGCCCG | 524 |
| ITGA4 | | 11203 | CGGGGAGTGGGACTGCGGCGGGGAGCCG | 580 |
| ITGA4 | | 11208 | ACTCGCCGAAGGCCCCTGGGGAAC | 718 |
| ITGA4 | | 11222 | CGGGCTGCATGCGTGAGCAGG | 840 |
| ITGA4 | | 11252 | CGGCAGGCGGTTTAGGCTGTGGCTG | 885 |
| ITGA4 | | 11278 | CCGATTCGGATTGCTCCAGCTGG | 962 |
| ITGA4 | | 11289 | CGCACCCACTCAGTTGCCACGGG | 1008 |
| ITGA4 | | 11327 | CGGAGACCCACAACGCAACACACC | 1099 |
| APP | | 7607 | CGCGACCCTGCGCGGGGCACCG | 1 |
| APP | | 7741 | GTGCGAGTGGGATCCGCCGCG | 34 |
| APP | | 7875 | CGCGCCGCCACCGCCGCCGTCTCCCGG | 68 |
| APP | | 8009 | CGCGCACGCTCCTCCGCGTGCTCTCG | 101 |
| APP | | 8143 | CCGAGGAAACTGACGGAGCCCGAGCGCGG | 137 |
| APP | | 8145 | CGAGTCAGCTGATCCGGCCCACCCCG | 186 |
| APP | | 8310 | CGAGAGAGACCCCTAGCGGCGCCG | 221 |
| APP | | 8475 | CGCCCGCTCGCGCCGGGAGGGGCCCTCG | 256 |
| APP | | 8640 | CGCGCCCACAGGTGCACGCGCCCTTGGCG | 289 |
| APP | | 8805 | GGCCGACGGCCCACCTGGGCTTCG | 351 |
| APP | | 8825 | CGCTGAGGCTCTAGAAAAGTCGAGAG | 446 |
| APP | | 8843 | CTCGTCCCCGTGAGCTTGAATCATCCGACCC | 480 |
| APP | | 8912 | AGGCGTTTCTGGAAGAGAATGAGAACG | 604 |
| APP | | 8927 | CGTCAAAAGCAGGCACGAGCAACCTG | 701 |
| APP | | 8928 | GAACGAACCAAAGGAGCAAGGCG | 742 |
| APP | | 8929 | CGCTGACAAGGGTGCCTAGGCCCGG | 1318 |
| APP | | 8948 | CGCAATTCCGTATTTGTTCCGG | 1738 |
| APP | | 8969 | GTACGTTGGCAGACGCAGTGACG | 4923 |
| CMYC | | 7551 | CGATGAGGGTATTAACTCTGGC | 335580 |
| CMYC | CM12 | 7552 | CGGGGGTCCTCAGCCGTCCAGACC | 518 |
| CMYC | CM13 | 7602 | CGCTTATGGGGAGGGTGGGGAGGG | 634 |
| CMYC | CM14 | 7603 | CGGTGGGCGGAGATTAGCGAGAGA | 559 |
| CMYC | | 7606 | GGCGCTTATGGGGAGGGTGGGGAGGG | 632 |
| CMYC | | 13684 | CCTGGCACGTGTCCCTGGTCAAG | 3482 |
| CMYC | | 13703 | CACGTGCGGCCTGTCAAGAGATGA | 5926 |
| FGFR1 | | 13484 | CGAGCCAGGCAGGGCCCCTCGCAAGTG | 1850 |
| FGFR1 | | 13522 | GACGGATATGAGTCCAGAAGTTGCG | 1472 |
| FGFR1 | | 13535 | TAGCTGCGTGCAGTGGCGCGCGCCTGT | 4910 |
| FGFR1 | | 13561 | CCGCCTCGCCAGCTCCCGAGCGCGAGTT | 10239 |
| FGFR1 | | 13655 | CGCCTCCTCCCAGGTGTGGGCTGGCTGCAGACCG | 3067 |
| CD68 | | 13681 | CGAGAACATGGCTTTCCAGCGTCTG | 520 |
| ALK | | 11471 | CGCCGGAGGAGGCCGTTTACACTGC | 3 |
| ALK | | 11530 | CGTGCGCGCAAGTCTCTTGCTTTCC | 132 |
| ALK | | 11555 | CGCTCTCCGCGCCGAGTGCCGCGCC | 269 |
| ALK | | 11621 | CGCCTTTTGCGTTCCTTTTGGCTCC | 482 |
| ALK | | 11681 | CGCAGGCACTGGAGCGGCCCCGGCG | 701 |
| ALK | | 11794 | CGACCCTCCGAACAGAGGCGGCGGG | 851 |
| ALK | | 11825 | CGCGCTGCTGCCCGACCCACGCAGT | 1022 |
| ALK | | 11901 | CGGGTCCGACTTCGGAAAAACAGGT | 1313 |
| ALK | | 11923 | CGGCCTGTCGGGTAGCACAGGAGTT | 2022 |
| MSI2 | | 11989 | CGGTGACGTCACGCACCCCCGTGCG | 360 |
| MSI2 | | 12058 | CGGATACAATTACCCATATTGT | 1535 |
| MSI2 | | 12059 | GACTCAGTTGCTAACAACCATGAGCG | 10624 |
| MSI2 | | 12060 | CAGTTGCTAACAACCATGAGCG | 10628 |
| MSI2 | | 12061 | CATGAAAATTTCACCAAGTATAAATTAC | 10909 |
| MSI2 | | 12062 | CACCAAGTATAAATTACAGGTCT | 10920 |
| JAK2 | | 12063 | CGCACCAGTTTGTCCACGTCCAGTG | 1663 |
| JAK2 | | 12098 | GCCGTCACTGCCGACATAAGCACAGAC | 1811 |
| CCND1 | | 12098 | CGCTGCTACTGCGCCGACAGCCCTC | 133 |
| CCND1 | | 12242 | CGGCAGAATGGGCGCATTTCCAAGA | 612 |
| CCND1 | | 12287 | ACGCCACGAGGGCACCCACGGGCGGA | 637 |
| CCND1 | | 12332 | CGGTGACCGCGGCCTGGGCGGATGG | 2755 |
| CCND1 | | 12388 | CGGGACTCAGCGCGGCTGCGCGCCG | 2907 |
| BL9 | | 13682 | TGTCCACCTGAACACCTAGTCC | 2388 |

TABLE 4
Additional DNAi Sequences Used in Supporting Data (disclosed in
Pat. No.: 7,807,647)

| | | | | Location relative to |
|---|---|---|---|---|
| | | | | 5′ upstream region |
| Target | Design ID | Sequence ID | Sequence | from gene start site |
| KRAS | KR1 | 51 | CCCGGAGCGGGACCGGACCGCGG | 5923 |
| KRAS | KR2 | 52 | GCCGGACCCACGCGGCGGCCCGCC | 5856 |
| BCL2 | BL2 | 13724 | CACGCACGCGCATCCCCGCCCGTG | 2388 |
| BCL2 | BL3 | 13725 | ACCGGCGCTCGGCGCGCGGA | Mismatched |
| BCL2 | BL4 | 13726 | GACGCGCCGGGCCGGGCGGA | Mismatched |
| BCL2 | BL7 | 13727 | GGCGCGCGGGGCCGGGCCGGG | — |
| CMYC | CM7 | 13728 | GGGCGCCTCGCTAAGGCTGGGGAAAGGGCCGCGC | 969 |

TABLE 5
DNAi Sequences Used in Supporting Data as Negative Controls

| | | | | Location relative to 5′ upstream |
|---|---|---|---|---|
| Target | Design ID | SEQ ID NO: | Sequence | region from gene start site |
| Survivin | SU3 | 105 | GACATCGCTGTCCCGGCGAGTACATCGTT | 665 |
| KRAS | KR0525 | 1516 | AGTCTCCCCTTCCCGGAGACT | 10265 |

The application's sequence listing, which the Patent Office published only in electronic form, follows.

SEQUENCE LISTING (13728 sequences)

SEQ ID NO: 1 - DNA, 22 bp, Artificial
  Synthetically generated peptide
gagcgcacgccctcttaggcgg

SEQ ID NO: 2 - DNA, 20 bp, Artificial
  Synthetically generated peptide
agcgcacgccctcttaggcg

SEQ ID NO: 3 - DNA, 20 bp, Artificial
  Synthetically generated peptide
gcgcacgccctcttaggcgg

SEQ ID NO: 4 - DNA, 20 bp, Artificial
  Synthetically generated peptide
cgcacgccctcttaggcggt

SEQ ID NO: 5 - DNA, 20 bp, Artificial
  Synthetically generated peptide
gcacgccctcttaggcggtc

SEQ ID NO: 6 - DNA, 20 bp, Artificial
  Synthetically generated peptide
cacgccctcttaggcggtcc

SEQ ID NO: 7 - DNA, 20 bp, Artificial
  Synthetically generated peptide
acgccctcttaggcggtcca

SEQ ID NO: 8 - DNA, 20 bp, Artificial
  Synthetically generated peptide
cgccctcttaggcggtccac

SEQ ID NO: 9 - DNA, 20 bp, Artificial
  Synthetically generated peptide
gccctcttaggcggtccacc

SEQ ID NO: 10 - DNA, 20 bp, Artificial
  Synthetically generated peptide
ccctcttaggcggtccaccc

SEQ ID NO: 11 - DNA, 20 bp, Artificial
  Synthetically generated peptide
cctcttaggcggtccacccc

SEQ ID NO: 12 - DNA, 20 bp, Artificial
  Synthetically generated peptide
ctcttaggcggtccaccccc

SEQ ID NO: 13 - DNA, 20 bp, Artificial
  Synthetically generated peptide
tcttaggcggtccacccccc

SEQ ID NO: 14 - DNA, 20 bp, Artificial
  Synthetically generated peptide
cttaggcggtccaccccccg

SEQ ID NO: 15 - DNA, 20 bp, Artificial
  Synthetically generated peptide
ttaggcggtccaccccccgc

SEQ ID NO: 16 - DNA, 20 bp, Artificial
  Synthetically generated peptide
taggcggtccaccccccgcg

SEQ ID NO: 17 - DNA, 20 bp, Artificial
  Synthetically generated peptide
aggcggtccaccccccgcgg

SEQ ID NO: 18 - DNA, 20 bp, Artificial
  Synthetically generated peptide
ggcggtccaccccccgcggc

SEQ ID NO: 19 - DNA, 20 bp, Artificial
  Synthetically generated peptide
gcggtccaccccccgcggcc

SEQ ID NO: 20 - DNA, 20 bp, Artificial
  Synthetically generated peptide
cggtccaccccccgcggcct

SEQ ID NO: 21 - DNA, 20 bp, Artificial
  Synthetically generated peptide
ggtccaccccccgcggcctt

SEQ ID NO: 22 - DNA, 20 bp, Artificial
  Synthetically generated peptide
gtccaccccccgcggccttc

SEQ ID NO: 23 - DNA, 20 bp, Artificial
  Synthetically generated peptide
tccaccccccgcggccttct

SEQ ID NO: 24 - DNA, 20 bp, Artificial
  Synthetically generated peptide
ccaccccccgcggccttctg

SEQ ID NO: 25 - DNA, 20 bp, Artificial
  Synthetically generated peptide
caccccccgcggccttctgg

SEQ ID NO: 26 - DNA, 20 bp, Artificial
  Synthetically generated peptide
accccccgcggccttctggg

SEQ ID NO: 27 - DNA, 20 bp, Artificial
  Synthetically generated peptide
ccccccgcggccttctggga

SEQ ID NO: 28 - DNA, 20 bp, Artificial
  Synthetically generated peptide
cccccgcggccttctgggag

SEQ ID NO: 29 - DNA, 20 bp, Artificial
  Synthetically generated peptide
ccccgcggccttctgggagt

SEQ ID NO: 30 - DNA, 20 bp, Artificial
  Synthetically generated peptide
cccgcggccttctgggagta

SEQ ID NO: 31 - DNA, 20 bp, Artificial
  Synthetically generated peptide
ccgcggccttctgggagtag

SEQ ID NO: 32 - DNA, 20 bp, Artificial
  Synthetically generated peptide
cgcggccttctgggagtaga

SEQ ID NO: 33 - DNA, 20 bp, Artificial
  Synthetically generated peptide
gcggccttctgggagtagag

SEQ ID NO: 34 - DNA, 20 bp, Artificial
  Synthetically generated peptide
cggccttctgggagtagagg

SEQ ID NO: 35 - DNA, 20 bp, Artificial
  Synthetically generated peptide
ggagcgcacgccctcttagg

SEQ ID NO: 36 - DNA, 20 bp, Artificial
  Synthetically generated peptide
gggagcgcacgccctcttag

SEQ ID NO: 37 - DNA, 20 bp, Artificial
  Synthetically generated peptide
cgggagcgcacgccctctta

SEQ ID NO: 38 - DNA, 20 bp, Artificial
  Synthetically generated peptide
tcgggagcgcacgccctctt

SEQ ID NO: 39 - DNA, 20 bp, Artificial
  Synthetically generated peptide
gtcgggagcgcacgccctct

SEQ ID NO: 40 - DNA, 20 bp, Artificial
  Synthetically generated peptide
tgtcgggagcgcacgccctc

SEQ ID NO: 41 - DNA, 20 bp, Artificial
  Synthetically generated peptide
atgtcgggagcgcacgccct

SEQ ID NO: 42 - DNA, 20 bp, Artificial
  Synthetically generated peptide
catgtcgggagcgcacgccc

SEQ ID NO: 43 - DNA, 20 bp, Artificial
  Synthetically generated peptide
gcatgtcgggagcgcacgcc

SEQ ID NO: 44 - DNA, 20 bp, Artificial
  Synthetically generated peptide
ggcatgtcgggagcgcacgc

SEQ ID NO: 45 - DNA, 20 bp, Artificial
  Synthetically generated peptide
gggcatgtcgggagcgcacg

SEQ ID NO: 46 - DNA, 20 bp, Artificial
  Synthetically generated peptide
ggggcatgtcgggagcgcac

SEQ ID NO: 47 - DNA, 20 bp, Artificial
  Synthetically generated peptide
cggggcatgtcgggagcgca

SEQ ID NO: 48 - DNA, 20 bp, Artificial
  Synthetically generated peptide
gcggggcatgtcgggagcgc

SEQ ID NO: 49 - DNA, 20 bp, Artificial
  Synthetically generated peptide
cgcggggcatgtcgggagcg

SEQ ID NO: 50 - DNA, 20 bp, Artificial
  Synthetically generated peptide
ccgcggggcatgtcgggagc

SEQ ID NO: 51 - DNA, 20 bp, Artificial
  Synthetically generated peptide
gccgcggggcatgtcgggag

SEQ ID NO: 52 - DNA, 20 bp, Artificial
  Synthetically generated peptide
cgccgcggggcatgtcggga

SEQ ID NO: 53 - DNA, 20 bp, Artificial
  Synthetically generated peptide
gcgccgcggggcatgtcggg

SEQ ID NO: 54 - DNA, 20 bp, Artificial
  Synthetically generated peptide
cgcgccgcggggcatgtcgg

SEQ ID NO: 55 - DNA, 20 bp, Artificial
  Synthetically generated peptide
gcgcgccgcggggcatgtcg

SEQ ID NO: 56 - DNA, 20 bp, Artificial
  Synthetically generated peptide
ggcgcgccgcggggcatgtc

SEQ ID NO: 57 - DNA, 20 bp, Artificial
  Synthetically generated peptide
tggcgcgccgcggggcatgt

SEQ ID NO: 58 - DNA, 20 bp, Artificial
  Synthetically generated peptide
atggcgcgccgcggggcatg

SEQ ID NO: 59 - DNA, 20 bp, Artificial
  Synthetically generated peptide
aatggcgcgccgcggggcat

SEQ ID NO: 60 - DNA, 20 bp, Artificial
  Synthetically generated peptide
taatggcgcgccgcggggca

SEQ ID NO: 61 - DNA, 20 bp, Artificial
  Synthetically generated peptide
ttaatggcgcgccgcggggc

SEQ ID NO: 62 - DNA, 20 bp, Artificial
  Synthetically generated peptide
gttaatggcgcgccgcgggg

SEQ ID NO: 63 - DNA, 20 bp, Artificial
  Synthetically generated peptide
ggttaatggcgcgccgcggg

SEQ ID NO: 64 - DNA, 20 bp, Artificial
  Synthetically generated peptide
cggttaatggcgcgccgcgg

SEQ ID NO: 65 - DNA, 20 bp, Artificial
  Synthetically generated peptide
gcggttaatggcgcgccgcg

SEQ ID NO: 66 - DNA, 20 bp, Artificial
  Synthetically generated peptide
ggcggttaatggcgcgccgc

SEQ ID NO: 67 - DNA, 20 bp, Artificial
  Synthetically generated peptide
tggcggttaatggcgcgccg

SEQ ID NO: 68 - DNA, 20 bp, Artificial
  Synthetically generated peptide
ctggcggttaatggcgcgcc

SEQ ID NO: 69 - DNA, 20 bp, Artificial
  Synthetically generated peptide
tctggcggttaatggcgcgc

SEQ ID NO: 70 - DNA, 20 bp, Artificial
  Synthetically generated peptide
atctggcggttaatggcgcg

SEQ ID NO: 71 - DNA, 20 bp, Artificial
  Synthetically generated peptide
aatctggcggttaatggcgc

SEQ ID NO: 72 - DNA, 20 bp, Artificial
  Synthetically generated peptide
aaatctggcggttaatggcg

SEQ ID NO: 73 - DNA, 20 bp, Artificial
  Synthetically generated peptide
caaatctggcggttaatggc

SEQ ID NO: 74 - DNA, 20 bp, Artificial
  Synthetically generated peptide
tcaaatctggcggttaatgg

SEQ ID NO: 75 - DNA, 27 bp, Artificial
  Synthetically generated peptide
caccccgaggtacgatcagtgcgtacc

SEQ ID NO: 76 - DNA, 20 bp, Artificial
  Synthetically generated peptide
accccgaggtacgatcagtg

SEQ ID NO: 77 - DNA, 20 bp, Artificial
  Synthetically generated peptide
ccccgaggtacgatcagtgc

SEQ ID NO: 78 - DNA, 20 bp, Artificial
  Synthetically generated peptide
cccgaggtacgatcagtgcg

SEQ ID NO: 79 - DNA, 20 bp, Artificial
  Synthetically generated peptide
ccgaggtacgatcagtgcgt

SEQ ID NO: 80 - DNA, 20 bp, Artificial
  Synthetically generated peptide
cgaggtacgatcagtgcgta

SEQ ID NO: 81 - DNA, 20 bp, Artificial
  Synthetically generated peptide
gaggtacgatcagtgcgtac

SEQ ID NO: 82 - DNA, 20 bp, Artificial
  Synthetically generated peptide
aggtacgatcagtgcgtacc

SEQ ID NO: 83 - DNA, 20 bp, Artificial
  Synthetically generated peptide
ggtacgatcagtgcgtacca

SEQ ID NO: 84 - DNA, 20 bp, Artificial
  Synthetically generated peptide
gtacgatcagtgcgtaccaa

SEQ ID NO: 85 - DNA, 20 bp, Artificial
  Synthetically generated peptide
tacgatcagtgcgtaccaag

SEQ ID NO: 86 - DNA, 20 bp, Artificial
  Synthetically generated peptide
acgatcagtgcgtaccaagt

SEQ ID NO: 87 - DNA, 20 bp, Artificial
  Synthetically generated peptide
cgatcagtgcgtaccaagta

SEQ ID NO: 88 - DNA, 20 bp, Artificial
  Synthetically generated peptide
gatcagtgcgtaccaagtac

SEQ ID NO: 89 - DNA, 20 bp, Artificial
  Synthetically generated peptide
atcagtgcgtaccaagtaca

SEQ ID NO: 90 - DNA, 20 bp, Artificial
  Synthetically generated peptide
tcagtgcgtaccaagtacat

SEQ ID NO: 91 - DNA, 20 bp, Artificial
  Synthetically generated peptide
cagtgcgtaccaagtacata

SEQ ID NO: 92 - DNA, 20 bp, Artificial
  Synthetically generated peptide
ccaccccgaggtacgatcag

SEQ ID NO: 93 - DNA, 20 bp, Artificial
  Synthetically generated peptide
cccaccccgaggtacgatca

SEQ ID NO: 94 - DNA, 20 bp, Artificial
  Synthetically generated peptide
tcccaccccgaggtacgatc

SEQ ID NO: 95 - DNA, 20 bp, Artificial
  Synthetically generated peptide
ctcccaccccgaggtacgat

SEQ ID NO: 96 - DNA, 20 bp, Artificial
  Synthetically generated peptide
tctcccaccccgaggtacga

SEQ ID NO: 97 - DNA, 20 bp, Artificial
  Synthetically generated peptide
ttctcccaccccgaggtacg

SEQ ID NO: 98 - DNA, 20 bp, Artificial
  Synthetically generated peptide
cttctcccaccccgaggtac

SEQ ID NO: 99 - DNA, 20 bp, Artificial
  Synthetically generated peptide
tcttctcccaccccgaggta

SEQ ID NO: 100 - DNA, 20 bp, Artificial
  Synthetically generated peptide
ctcttctcccaccccgaggt

SEQ ID NO: 101 - DNA, 20 bp, Artificial
  Synthetically generated peptide
tctcttctcccaccccgagg

SEQ ID NO: 102 - DNA, 20 bp, Artificial
  Synthetically generated peptide
ctctcttctcccaccccgag

SEQ ID NO: 103 - DNA, 20 bp, Artificial
  Synthetically generated peptide
cctctcttctcccaccccga

SEQ ID NO: 104 - DNA, 20 bp, Artificial
  Synthetically generated peptide
ccctctcttctcccaccccg

SEQ ID NO: 105 - DNA, 29 bp, Artificial
  Synthetically generated peptide
gacatcgctgtcccggcgagtacatcgtt

SEQ ID NO: 106 - DNA, 20 bp, Artificial
  Synthetically generated peptide
acatcgctgtcccggcgagt

SEQ ID NO: 107 - DNA, 20 bp, Artificial
  Synthetically generated peptide
catcgctgtcccggcgagta

SEQ ID NO: 108 - DNA, 20 bp, Artificial
  Synthetically generated peptide
atcgctgtcccggcgagtac

SEQ ID NO: 109 - DNA, 20 bp, Artificial
  Synthetically generated peptide
tcgctgtcccggcgagtaca

SEQ ID NO: 110 - DNA, 20 bp, Artificial
  Synthetically generated peptide
cgctgtcccggcgagtacat

SEQ ID NO: 111 - DNA, 20 bp, Artificial
  Synthetically generated peptide
gctgtcccggcgagtacatc

SEQ ID NO: 112 - DNA, 20 bp, Artificial
  Synthetically generated peptide
ctgtcccggcgagtacatcg

SEQ ID NO: 113 - DNA, 20 bp, Artificial
  Synthetically generated peptide
tgtcccggcgagtacatcgt

SEQ ID NO: 114 - DNA, 20 bp, Artificial
  Synthetically generated peptide
gtcccggcgagtacatcgtt

SEQ ID NO: 115 - DNA, 20 bp, Artificial
  Synthetically generated peptide
tcccggcgagtacatcgttg

SEQ ID NO: 116 - DNA, 20 bp, Artificial
  Synthetically generated peptide
cccggcgagtacatcgttga

SEQ ID NO: 117 - DNA, 20 bp, Artificial
  Synthetically generated peptide
ccggcgagtacatcgttgac

SEQ ID NO: 118 - DNA, 20 bp, Artificial
  Synthetically generated peptide
cggcgagtacatcgttgact

SEQ ID NO: 119 - DNA, 20 bp, Artificial
  Synthetically generated peptide
ggcgagtacatcgttgactg

SEQ ID NO: 120 - DNA, 20 bp, Artificial
  Synthetically generated peptide
gcgagtacatcgttgactgc

SEQ ID NO: 121 - DNA, 20 bp, Artificial
  Synthetically generated peptide
cgagtacatcgttgactgca

SEQ ID NO: 122 - DNA, 20 bp, Artificial
  Synthetically generated peptide
gagtacatcgttgactgcac

SEQ ID NO: 123 - DNA, 20 bp, Artificial
  Synthetically generated peptide
agtacatcgttgactgcacg

SEQ ID NO: 124 - DNA, 20 bp, Artificial
  Synthetically generated peptide
gtacatcgttgactgcacga

SEQ ID NO: 125 - DNA, 20 bp, Artificial
  Synthetically generated peptide
tacatcgttgactgcacgac

SEQ ID NO: 126 - DNA, 20 bp, Artificial
  Synthetically generated peptide
acatcgttgactgcacgacc

SEQ ID NO: 127 - DNA, 20 bp, Artificial
  Synthetically generated peptide
catcgttgactgcacgacct

SEQ ID NO: 128 - DNA, 20 bp, Artificial
  Synthetically generated peptide
atcgttgactgcacgacctg

SEQ ID NO: 129 - DNA, 20 bp, Artificial
  Synthetically generated peptide
tcgttgactgcacgacctgg

SEQ ID NO: 130 - DNA, 20 bp, Artificial
  Synthetically generated peptide
cgttgactgcacgacctggg

SEQ ID NO: 131 - DNA, 20 bp, Artificial
  Synthetically generated peptide
gttgactgcacgacctgggt

SEQ ID NO: 132 - DNA, 20 bp, Artificial
  Synthetically generated peptide
ttgactgcacgacctgggtt

SEQ ID NO: 133 - DNA, 20 bp, Artificial
  Synthetically generated peptide
tgactgcacgacctgggttt

SEQ ID NO: 134 - DNA, 20 bp, Artificial
  Synthetically generated peptide
gactgcacgacctgggtttc

SEQ ID NO: 135 - DNA, 20 bp, Artificial
  Synthetically generated peptide
actgcacgacctgggtttcc

SEQ ID NO: 136 - DNA, 20 bp, Artificial
  Synthetically generated peptide
ctgcacgacctgggtttcca

SEQ ID NO: 137 - DNA, 20 bp, Artificial
  Synthetically generated peptide
tgcacgacctgggtttccag

SEQ ID NO: 138 - DNA, 20 bp, Artificial
  Synthetically generated peptide
gcacgacctgggtttccagg

SEQ ID NO: 139 - DNA, 20 bp, Artificial
  Synthetically generated peptide
cacgacctgggtttccagga

SEQ ID NO: 140 - DNA, 20 bp, Artificial
  Synthetically generated peptide
acgacctgggtttccaggag

SEQ ID NO: 141 - DNA, 20 bp, Artificial
  Synthetically generated peptide
cgacctgggtttccaggagg

SEQ ID NO: 142 - DNA, 20 bp, Artificial
  Synthetically generated peptide
agacatcgctgtcccggcga

SEQ ID NO: 143 - DNA, 20 bp, Artificial
  Synthetically generated peptide
cagacatcgctgtcccggcg

SEQ ID NO: 144 - DNA, 20 bp, Artificial
  Synthetically generated peptide
gcagacatcgctgtcccggc

SEQ ID NO: 145 - DNA, 20 bp, Artificial
  Synthetically generated peptide
agcagacatcgctgtcccgg

SEQ ID NO: 146 - DNA, 20 bp, Artificial
  Synthetically generated peptide
cagcagacatcgctgtcccg

SEQ ID NO: 147 - DNA, 20 bp, Artificial
  Synthetically generated peptide
gcagcagacatcgctgtccc

SEQ ID NO: 148 - DNA, 20 bp, Artificial
  Synthetically generated peptide
tgcagcagacatcgctgtcc

SEQ ID NO: 149 - DNA, 20 bp, Artificial
  Synthetically generated peptide
gtgcagcagacatcgctgtc

SEQ ID NO: 150 - DNA, 20 bp, Artificial
  Synthetically generated peptide
agtgcagcagacatcgctgt

SEQ ID NO: 151 - DNA, 20 bp, Artificial
  Synthetically generated peptide
gagtgcagcagacatcgctg

SEQ ID NO: 152 - DNA, 20 bp, Artificial
  Synthetically generated peptide
ggagtgcagcagacatcgct

SEQ ID NO: 153 - DNA, 20 bp, Artificial
  Synthetically generated peptide
tggagtgcagcagacatcgc

SEQ ID NO: 154 - DNA, 20 bp, Artificial
  Synthetically generated peptide
atggagtgcagcagacatcg

SEQ ID NO: 155 - DNA, 21 bp, Artificial
  Synthetically generated peptide
gagcgcacgccctcttaggcg

SEQ ID NO: 156 - DNA, 20 bp, Artificial
  Synthetically generated peptide
agcgcacgccctcttaggcg

SEQ ID NO: 157 - DNA, 20 bp, Artificial
  Synthetically generated peptide
gcgcacgccctcttaggcgg

SEQ ID NO: 158 - DNA, 20 bp, Artificial
  Synthetically generated peptide
cgcacgccctcttaggcggt

SEQ ID NO: 159 - DNA, 20 bp, Artificial
  Synthetically generated peptide
gcacgccctcttaggcggtc

SEQ ID NO: 160 - DNA, 20 bp, Artificial
  Synthetically generated peptide
cacgccctcttaggcggtcc

SEQ ID NO: 161 - DNA, 20 bp, Artificial
  Synthetically generated peptide
acgccctcttaggcggtcca

SEQ ID NO: 162 - DNA, 20 bp, Artificial
  Synthetically generated peptide
cgccctcttaggcggtccac

SEQ ID NO: 163 - DNA, 20 bp, Artificial
  Synthetically generated peptide
gccctcttaggcggtccacc

SEQ ID NO: 164 - DNA, 20 bp, Artificial
  Synthetically generated peptide
ccctcttaggcggtccaccc

SEQ ID NO: 165 - DNA, 20 bp, Artificial
  Synthetically generated peptide
cctcttaggcggtccacccc

SEQ ID NO: 166 - DNA, 20 bp, Artificial
  Synthetically generated peptide
ctcttaggcggtccaccccc

SEQ ID NO: 167 - DNA, 20 bp, Artificial
  Synthetically generated peptide
tcttaggcggtccacccccc

SEQ ID NO: 168 - DNA, 20 bp, Artificial
  Synthetically generated peptide
cttaggcggtccaccccccg

SEQ ID NO: 169 - DNA, 20 bp, Artificial
  Synthetically generated peptide
ttaggcggtccaccccccgc

SEQ ID NO: 170 - DNA, 20 bp, Artificial
  Synthetically generated peptide
taggcggtccaccccccgcg

SEQ ID NO: 171 - DNA, 20 bp, Artificial
  Synthetically generated peptide
aggcggtccaccccccgcgg

SEQ ID NO: 172 - DNA, 20 bp, Artificial
  Synthetically generated peptide
ggcggtccaccccccgcggc

SEQ ID NO: 173 - DNA, 20 bp, Artificial
  Synthetically generated peptide
gcggtccaccccccgcggcc

SEQ ID NO: 174 - DNA, 20 bp, Artificial
  Synthetically generated peptide
cggtccaccccccgcggcct

SEQ ID NO: 175 - DNA, 20 bp, Artificial
  Synthetically generated peptide
ggtccaccccccgcggcctt

SEQ ID NO: 176 - DNA, 20 bp, Artificial
  Synthetically generated peptide
gtccaccccccgcggccttc

SEQ ID NO: 177 - DNA, 20 bp, Artificial
  Synthetically generated peptide
tccaccccccgcggccttct

SEQ ID NO: 178 - DNA, 20 bp, Artificial
  Synthetically generated peptide
ccaccccccgcggccttctg

SEQ ID NO: 179 - DNA, 20 bp, Artificial
  Synthetically generated peptide
caccccccgcggccttctgg

SEQ ID NO: 180 - DNA, 20 bp, Artificial
  Synthetically generated peptide
accccccgcggccttctggg

SEQ ID NO: 181 - DNA, 20 bp, Artificial
  Synthetically generated peptide
ccccccgcggccttctggga

SEQ ID NO: 182 - DNA, 20 bp, Artificial
  Synthetically generated peptide
cccccgcggccttctgggag

SEQ ID NO: 183 - DNA, 20 bp, Artificial
  Synthetically generated peptide
ccccgcggccttctgggagt

SEQ ID NO: 184 - DNA, 20 bp, Artificial
  Synthetically generated peptide
cccgcggccttctgggagta

SEQ ID NO: 185 - DNA, 20 bp, Artificial
  Synthetically generated peptide
ccgcggccttctgggagtag

SEQ ID NO: 186 - DNA, 20 bp, Artificial
  Synthetically generated peptide
cgcggccttctgggagtaga

SEQ ID NO: 187 - DNA, 20 bp, Artificial
  Synthetically generated peptide
gcggccttctgggagtagag

SEQ ID NO: 188 - DNA, 20 bp, Artificial
  Synthetically generated peptide
cggccttctgggagtagagg

SEQ ID NO: 189 - DNA, 20 bp, Artificial
  Synthetically generated peptide
ggagcgcacgccctcttagg

SEQ ID NO: 190 - DNA, 20 bp, Artificial
  Synthetically generated peptide
gggagcgcacgccctcttag

SEQ ID NO: 191 - DNA, 20 bp, Artificial
  Synthetically generated peptide
cgggagcgcacgccctctta

SEQ ID NO: 192 - DNA, 20 bp, Artificial
  Synthetically generated peptide
tcgggagcgcacgccctctt

SEQ ID NO: 193 - DNA, 20 bp, Artificial
  Synthetically generated peptide
gtcgggagcgcacgccctct

SEQ ID NO: 194 - DNA, 20 bp, Artificial
  Synthetically generated peptide
tgtcgggagcgcacgccctc

SEQ ID NO: 195 - DNA, 20 bp, Artificial
  Synthetically generated peptide
atgtcgggagcgcacgccct

SEQ ID NO: 196 - DNA, 20 bp, Artificial
  Synthetically generated peptide
catgtcgggagcgcacgccc

SEQ ID NO: 197 - DNA, 20 bp, Artificial
  Synthetically generated peptide
gcatgtcgggagcgcacgcc

SEQ ID NO: 198 - DNA, 20 bp, Artificial
  Synthetically generated peptide
ggcatgtcgggagcgcacgc

SEQ ID NO: 199 - DNA, 20 bp, Artificial
  Synthetically generated peptide
gggcatgtcgggagcgcacg

SEQ ID NO: 200 - DNA, 20 bp, Artificial
  Synthetically generated peptide
ggggcatgtcgggagcgcac

SEQ ID NO: 201 - DNA, 20 bp, Artificial
  Synthetically generated peptide
cggggcatgtcgggagcgca

SEQ ID NO: 202 - DNA, 20 bp, Artificial
  Synthetically generated peptide
gcggggcatgtcgggagcgc

SEQ ID NO: 203 - DNA, 20 bp, Artificial
  Synthetically generated peptide
cgcggggcatgtcgggagcg

SEQ ID NO: 204 - DNA, 20 bp, Artificial
  Synthetically generated peptide
ccgcggggcatgtcgggagc

SEQ ID NO: 205 - DNA, 20 bp, Artificial
  Synthetically generated peptide
gccgcggggcatgtcgggag

SEQ ID NO: 206 - DNA, 20 bp, Artificial
  Synthetically generated peptide
cgccgcggggcatgtcggga

SEQ ID NO: 207 - DNA, 20 bp, Artificial
  Synthetically generated peptide
gcgccgcggggcatgtcggg

SEQ ID NO: 208 - DNA, 20 bp, Artificial
  Synthetically generated peptide
cgcgccgcggggcatgtcgg

SEQ ID NO: 209 - DNA, 20 bp, Artificial
  Synthetically generated peptide
gcgcgccgcggggcatgtcg

SEQ ID NO: 210 - DNA, 20 bp, Artificial
  Synthetically generated peptide
ggcgcgccgcggggcatgtc

SEQ ID NO: 211 - DNA, 20 bp, Artificial
  Synthetically generated peptide
tggcgcgccgcggggcatgt

SEQ ID NO: 212 - DNA, 20 bp, Artificial
  Synthetically generated peptide
atggcgcgccgcggggcatg

SEQ ID NO: 213 - DNA, 20 bp, Artificial
  Synthetically generated peptide
aatggcgcgccgcggggcat

SEQ ID NO: 214 - DNA, 20 bp, Artificial
  Synthetically generated peptide
taatggcgcgccgcggggca

SEQ ID NO: 215 - DNA, 20 bp, Artificial
  Synthetically generated peptide
ttaatggcgcgccgcggggc

SEQ ID NO: 216 - DNA, 20 bp, Artificial
  Synthetically generated peptide
gttaatggcgcgccgcgggg

SEQ ID NO: 217 - DNA, 20 bp, Artificial
  Synthetically generated peptide
ggttaatggcgcgccgcggg

SEQ ID NO: 218 - DNA, 20 bp, Artificial
  Synthetically generated peptide
cggttaatggcgcgccgcgg

SEQ ID NO: 219 - DNA, 20 bp, Artificial
  Synthetically generated peptide
gcggttaatggcgcgccgcg

SEQ ID NO: 220 - DNA, 20 bp, Artificial
  Synthetically generated peptide
ggcggttaatggcgcgccgc

SEQ ID NO: 221 - DNA, 20 bp, Artificial
  Synthetically generated peptide
tggcggttaatggcgcgccg

SEQ ID NO: 222 - DNA, 20 bp, Artificial
  Synthetically generated peptide
ctggcggttaatggcgcgcc

SEQ ID NO: 223 - DNA, 20 bp, Artificial
  Synthetically generated peptide
tctggcggttaatggcgcgc

SEQ ID NO: 224 - DNA, 20 bp, Artificial
  Synthetically generated peptide
atctggcggttaatggcgcg

SEQ ID NO: 225 - DNA, 20 bp, Artificial
  Synthetically generated peptide
aatctggcggttaatggcgc

SEQ ID NO: 226 - DNA, 20 bp, Artificial
  Synthetically generated peptide
aaatctggcggttaatggcg

SEQ ID NO: 227 - DNA, 20 bp, Artificial
  Synthetically generated peptide
caaatctggcggttaatggc

SEQ ID NO: 228 - DNA, 20 bp, Artificial
  Synthetically generated peptide
tcaaatctggcggttaatgg

SEQ ID NO: 229 - DNA, 26 bp, Artificial
  Synthetically generated peptide
gagcgcacgccctcttaggcggtcca

SEQ ID NO: 230 - DNA, 20 bp, Artificial
  Synthetically generated peptide
agcgcacgccctcttaggcg

SEQ ID NO: 231 - DNA, 20 bp, Artificial
  Synthetically generated peptide
gcgcacgccctcttaggcgg

SEQ ID NO: 232 - DNA, 20 bp, Artificial
  Synthetically generated peptide
cgcacgccctcttaggcggt

SEQ ID NO: 233 - DNA, 20 bp, Artificial
  Synthetically generated peptide
gcacgccctcttaggcggtc

SEQ ID NO: 234 - DNA, 20 bp, Artificial
  Synthetically generated peptide
cacgccctcttaggcggtcc

SEQ ID NO: 235 - DNA, 20 bp, Artificial
  Synthetically generated peptide
acgccctcttaggcggtcca

SEQ ID NO: 236 - DNA, 20 bp, Artificial
  Synthetically generated peptide
cgccctcttaggcggtccac

SEQ ID NO: 237 - DNA, 20 bp, Artificial
  Synthetically generated peptide
gccctcttaggcggtccacc

SEQ ID NO: 238 - DNA, 20 bp, Artificial
  Synthetically generated peptide
ccctcttaggcggtccaccc

SEQ ID NO: 239 - DNA, 20 bp, Artificial
  Synthetically generated peptide
cctcttaggcggtccacccc

SEQ ID NO: 240 - DNA, 20 bp, Artificial
  Synthetically generated peptide
ctcttaggcggtccaccccc

SEQ ID NO: 241 - DNA, 20 bp, Artificial
  Synthetically generated peptide
tcttaggcggtccacccccc

SEQ ID NO: 242 - DNA, 20 bp, Artificial
  Synthetically generated peptide
cttaggcggtccaccccccg

SEQ ID NO: 243 - DNA, 20 bp, Artificial
  Synthetically generated peptide
ttaggcggtccaccccccgc

SEQ ID NO: 244 - DNA, 20 bp, Artificial
  Synthetically generated peptide
taggcggtccaccccccgcg

SEQ ID NO: 245 - DNA, 20 bp, Artificial
  Synthetically generated peptide
aggcggtccaccccccgcgg

SEQ ID NO: 246 - DNA, 20 bp, Artificial
  Synthetically generated peptide
ggcggtccaccccccgcggc

SEQ ID NO: 247 - DNA, 20 bp, Artificial
  Synthetically generated peptide
gcggtccaccccccgcggcc

SEQ ID NO: 248 - DNA, 20 bp, Artificial
  Synthetically generated peptide
cggtccaccccccgcggcct

SEQ ID NO: 249 - DNA, 20 bp, Artificial
  Synthetically generated peptide
ggtccaccccccgcggcctt

SEQ ID NO: 250 - DNA, 20 bp, Artificial
  Synthetically generated peptide
gtccaccccccgcggccttc

SEQ ID NO: 251 - DNA, 20 bp, Artificial
  Synthetically generated peptide
tccaccccccgcggccttct

SEQ ID NO: 252 - DNA, 20 bp, Artificial
  Synthetically generated peptide
ccaccccccgcggccttctg

SEQ ID NO: 253 - DNA, 20 bp, Artificial
  Synthetically generated peptide
caccccccgcggccttctgg

SEQ ID NO: 254 - DNA, 20 bp, Artificial
  Synthetically generated peptide
accccccgcggccttctggg

SEQ ID NO: 255 - DNA, 20 bp, Artificial
  Synthetically generated peptide
ccccccgcggccttctggga

SEQ ID NO: 256 - DNA, 20 bp, Artificial
  Synthetically generated peptide
cccccgcggccttctgggag

SEQ ID NO: 257 - DNA, 20 bp, Artificial
  Synthetically generated peptide
ccccgcggccttctgggagt

SEQ ID NO: 258 - DNA, 20 bp, Artificial
  Synthetically generated peptide
cccgcggccttctgggagta

SEQ ID NO: 259 - DNA, 20 bp, Artificial
  Synthetically generated peptide
ccgcggccttctgggagtag

SEQ ID NO: 260 - DNA, 20 bp, Artificial
  Synthetically generated peptide
cgcggccttctgggagtaga

SEQ ID NO: 261 - DNA, 20 bp, Artificial
  Synthetically generated peptide
gcggccttctgggagtagag

SEQ ID NO: 262 - DNA, 20 bp, Artificial
  Synthetically generated peptide
cggccttctgggagtagagg

SEQ ID NO: 263 - DNA, 20 bp, Artificial
  Synthetically generated peptide
ggagcgcacgccctcttagg

SEQ ID NO: 264 - DNA, 20 bp, Artificial
  Synthetically generated peptide
gggagcgcacgccctcttag

SEQ ID NO: 265 - DNA, 20 bp, Artificial
  Synthetically generated peptide
cgggagcgcacgccctctta

SEQ ID NO: 266 - DNA, 20 bp, Artificial
  Synthetically generated peptide
tcgggagcgcacgccctctt

SEQ ID NO: 267 - DNA, 20 bp, Artificial
  Synthetically generated peptide
gtcgggagcgcacgccctct

SEQ ID NO: 268 - DNA, 20 bp, Artificial
  Synthetically generated peptide
tgtcgggagcgcacgccctc

SEQ ID NO: 269 - DNA, 20 bp, Artificial
  Synthetically generated peptide
atgtcgggagcgcacgccct

SEQ ID NO: 270 - DNA, 20 bp, Artificial
  Synthetically generated peptide
catgtcgggagcgcacgccc

SEQ ID NO: 271 - DNA, 20 bp, Artificial
  Synthetically generated peptide
gcatgtcgggagcgcacgcc

SEQ ID NO: 272 - DNA, 20 bp, Artificial
  Synthetically generated peptide
ggcatgtcgggagcgcacgc

SEQ ID NO: 273 - DNA, 20 bp, Artificial
  Synthetically generated peptide
gggcatgtcgggagcgcacg

SEQ ID NO: 274 - DNA, 20 bp, Artificial
  Synthetically generated peptide
ggggcatgtcgggagcgcac

SEQ ID NO: 275 - DNA, 20 bp, Artificial
  Synthetically generated peptide
cggggcatgtcgggagcgca

SEQ ID NO: 276 - DNA, 20 bp, Artificial
  Synthetically generated peptide
gcggggcatgtcgggagcgc

SEQ ID NO: 277 - DNA, 20 bp, Artificial
  Synthetically generated peptide
cgcggggcatgtcgggagcg

SEQ ID NO: 278 - DNA, 20 bp, Artificial
  Synthetically generated peptide
ccgcggggcatgtcgggagc

SEQ ID NO: 279 - DNA, 20 bp, Artificial
  Synthetically generated peptide
gccgcggggcatgtcgggag

SEQ ID NO: 280 - DNA, 20 bp, Artificial
  Synthetically generated peptide
cgccgcggggcatgtcggga

SEQ ID NO: 281 - DNA, 20 bp, Artificial
  Synthetically generated peptide
gcgccgcggggcatgtcggg

SEQ ID NO: 282 - DNA, 20 bp, Artificial
  Synthetically generated peptide
cgcgccgcggggcatgtcgg

SEQ ID NO: 283 - DNA, 20 bp, Artificial
  Synthetically generated peptide
gcgcgccgcggggcatgtcg

SEQ ID NO: 284 - DNA, 20 bp, Artificial
  Synthetically generated peptide
ggcgcgccgcggggcatgtc

SEQ ID NO: 285 - DNA, 20 bp, Artificial
  Synthetically generated peptide
tggcgcgccgcggggcatgt

SEQ ID NO: 286 - DNA, 20 bp, Artificial
  Synthetically generated peptide
atggcgcgccgcggggcatg

SEQ ID NO: 287 - DNA, 20 bp, Artificial
  Synthetically generated peptide
aatggcgcgccgcggggcat

SEQ ID NO: 288 - DNA, 20 bp, Artificial
  Synthetically generated peptide
taatggcgcgccgcggggca

SEQ ID NO: 289 - DNA, 20 bp, Artificial
  Synthetically generated peptide
ttaatggcgcgccgcggggc

SEQ ID NO: 290 - DNA, 20 bp, Artificial
  Synthetically generated peptide
gttaatggcgcgccgcgggg

SEQ ID NO: 291 - DNA, 20 bp, Artificial
  Synthetically generated peptide
ggttaatggcgcgccgcggg

SEQ ID NO: 292 - DNA, 20 bp, Artificial
  Synthetically generated peptide
cggttaatggcgcgccgcgg

SEQ ID NO: 293 - DNA, 20 bp, Artificial
  Synthetically generated peptide
gcggttaatggcgcgccgcg

SEQ ID NO: 294 - DNA, 20 bp, Artificial
  Synthetically generated peptide
ggcggttaatggcgcgccgc

SEQ ID NO: 295 - DNA, 20 bp, Artificial
  Synthetically generated peptide
tggcggttaatggcgcgccg

SEQ ID NO: 296 - DNA, 20 bp, Artificial
  Synthetically generated peptide
ctggcggttaatggcgcgcc

SEQ ID NO: 297 - DNA, 20 bp, Artificial
  Synthetically generated peptide
tctggcggttaatggcgcgc

SEQ ID NO: 298 - DNA, 20 bp, Artificial
  Synthetically generated peptide
atctggcggttaatggcgcg

SEQ ID NO: 299 - DNA, 20 bp, Artificial
  Synthetically generated peptide
aatctggcggttaatggcgc

SEQ ID NO: 300 - DNA, 20 bp, Artificial
  Synthetically generated peptide
aaatctggcggttaatggcg

SEQ ID NO: 301 - DNA, 20 bp, Artificial
  Synthetically generated peptide
caaatctggcggttaatggc

SEQ ID NO: 302 - DNA, 20 bp, Artificial
  Synthetically generated peptide
tcaaatctggcggttaatgg

SEQ ID NO: 303 - DNA, 26 bp, Artificial
  Synthetically generated peptide
gtcgcccctgggtcctgctgattggc

SEQ ID NO: 304 - DNA, 20 bp, Artificial
  Synthetically generated peptide
tcgcccctgggtcctgctga

SEQ ID NO: 305 - DNA, 20 bp, Artificial
  Synthetically generated peptide
cgcccctgggtcctgctgat

SEQ ID NO: 306 - DNA, 20 bp, Artificial
  Synthetically generated peptide
ggtcgcccctgggtcctgct

SEQ ID NO: 307 - DNA, 20 bp, Artificial
  Synthetically generated peptide
aggtcgcccctgggtcctgc

SEQ ID NO: 308 - DNA, 20 bp, Artificial
  Synthetically generated peptide
caggtcgcccctgggtcctg

SEQ ID NO: 309 - DNA, 20 bp, Artificial
  Synthetically generated peptide
gcaggtcgcccctgggtcct

SEQ ID NO: 310 - DNA, 20 bp, Artificial
  Synthetically generated peptide
ggcaggtcgcccctgggtcc

SEQ ID NO: 311 - DNA, 20 bp, Artificial
  Synthetically generated peptide
tggcaggtcgcccctgggtc

SEQ ID NO: 312 - DNA, 20 bp, Artificial
  Synthetically generated peptide
ttggcaggtcgcccctgggt

SEQ ID NO: 313 - DNA, 20 bp, Artificial
  Synthetically generated peptide
tttggcaggtcgcccctggg

SEQ ID NO: 314 - DNA, 20 bp, Artificial
  Synthetically generated peptide
ctttggcaggtcgcccctgg

SEQ ID NO: 315 - DNA, 20 bp, Artificial
  Synthetically generated peptide
actttggcaggtcgcccctg

SEQ ID NO: 316 - DNA, 20 bp, Artificial
  Synthetically generated peptide
gactttggcaggtcgcccct

SEQ ID NO: 317 - DNA, 20 bp, Artificial
  Synthetically generated peptide
tgactttggcaggtcgcccc

SEQ ID NO: 318 - DNA, 20 bp, Artificial
  Synthetically generated peptide
ttgactttggcaggtcgccc

SEQ ID NO: 319 - DNA, 20 bp, Artificial
  Synthetically generated peptide
gttgactttggcaggtcgcc

SEQ ID NO: 320 - DNA, 20 bp, Artificial
  Synthetically generated peptide
agttgactttggcaggtcgc

SEQ ID NO: 321 - DNA, 20 bp, Artificial
  Synthetically generated peptide
cagttgactttggcaggtcg

SEQ ID NO: 322 - DNA, 29 bp, Artificial
  Synthetically generated peptide
cagcgagcctgggccccatcggcacatct

SEQ ID NO: 323 - DNA, 20 bp, Artificial
  Synthetically generated peptide
agcgagcctgggccccatcg

SEQ ID NO: 324 - DNA, 20 bp, Artificial
  Synthetically generated peptide
gcgagcctgggccccatcgg

SEQ ID NO: 325 - DNA, 20 bp, Artificial
  Synthetically generated peptide
cgagcctgggccccatcggc

SEQ ID NO: 326 - DNA, 20 bp, Artificial
  Synthetically generated peptide
gagcctgggccccatcggca

SEQ ID NO: 327 - DNA, 20 bp, Artificial
  Synthetically generated peptide
agcctgggccccatcggcac

SEQ ID NO: 328 - DNA, 20 bp, Artificial
  Synthetically generated peptide
gcctgggccccatcggcaca

SEQ ID NO: 329 - DNA, 20 bp, Artificial
  Synthetically generated peptide
cctgggccccatcggcacat

SEQ ID NO: 330 - DNA, 20 bp, Artificial
  Synthetically generated peptide
ctgggccccatcggcacatc

SEQ ID NO: 331 - DNA, 20 bp, Artificial
  Synthetically generated peptide
tgggccccatcggcacatct

SEQ ID NO: 332 - DNA, 20 bp, Artificial
  Synthetically generated peptide
gggccccatcggcacatctg

SEQ ID NO: 333 - DNA, 20 bp, Artificial
  Synthetically generated peptide
ggccccatcggcacatctga

SEQ ID NO: 334 - DNA, 20 bp, Artificial
  Synthetically generated peptide
gccccatcggcacatctgaa

SEQ ID NO: 335 - DNA, 20 bp, Artificial
  Synthetically generated peptide
ccccatcggcacatctgaag

SEQ ID NO: 336 - DNA, 20 bp, Artificial
  Synthetically generated peptide
cccatcggcacatctgaagg

SEQ ID NO: 337 - DNA, 20 bp, Artificial
  Synthetically generated peptide
ccatcggcacatctgaaggt

SEQ ID NO: 338 - DNA, 20 bp, Artificial
  Synthetically generated peptide
catcggcacatctgaaggtg

SEQ ID NO: 339 - DNA, 20 bp, Artificial
  Synthetically generated peptide
atcggcacatctgaaggtgc

SEQ ID NO: 340 - DNA, 20 bp, Artificial
  Synthetically generated peptide
tcggcacatctgaaggtgca

SEQ ID NO: 341 - DNA, 20 bp, Artificial
  Synthetically generated peptide
cggcacatctgaaggtgcac

SEQ ID NO: 342 - DNA, 20 bp, Artificial
  Synthetically generated peptide
gcagcgagcctgggccccat

SEQ ID NO: 343 - DNA, 20 bp, Artificial
  Synthetically generated peptide
tgcagcgagcctgggcccca

SEQ ID NO: 344 - DNA, 20 bp, Artificial
  Synthetically generated peptide
ctgcagcgagcctgggcccc

SEQ ID NO: 345 - DNA, 20 bp, Artificial
  Synthetically generated peptide
tctgcagcgagcctgggccc

SEQ ID NO: 346 - DNA, 20 bp, Artificial
  Synthetically generated peptide
atctgcagcgagcctgggcc

SEQ ID NO: 347 - DNA, 20 bp, Artificial
  Synthetically generated peptide
catctgcagcgagcctgggc

SEQ ID NO: 348 - DNA, 20 bp, Artificial
  Synthetically generated peptide
ccatctgcagcgagcctggg

SEQ ID NO: 349 - DNA, 20 bp, Artificial
  Synthetically generated peptide
gccatctgcagcgagcctgg

SEQ ID NO: 350 - DNA, 20 bp, Artificial
  Synthetically generated peptide
ggccatctgcagcgagcctg

SEQ ID NO: 351 - DNA, 20 bp, Artificial
  Synthetically generated peptide
gggccatctgcagcgagcct

SEQ ID NO: 352 - DNA, 20 bp, Artificial
  Synthetically generated peptide
ggggccatctgcagcgagcc

SEQ ID NO: 353 - DNA, 20 bp, Artificial
  Synthetically generated peptide
gggggccatctgcagcgagc

SEQ ID NO: 354 - DNA, 20 bp, Artificial
  Synthetically generated peptide
agggggccatctgcagcgag

SEQ ID NO: 355 - DNA, 20 bp, Artificial
  Synthetically generated peptide
aagggggccatctgcagcga

SEQ ID NO: 356 - DNA, 20 bp, Artificial
  Synthetically generated peptide
gaagggggccatctgcagcg

SEQ ID NO: 357 - DNA, 25 bp, Artificial
  Synthetically generated peptide
cccgcggccttctgggagtagaggc

SEQ ID NO: 358 - DNA, 20 bp, Artificial
  Synthetically generated peptide
ccgcggccttctgggagtag

SEQ ID NO: 359 - DNA, 20 bp, Artificial
  Synthetically generated peptide
cgcggccttctgggagtaga

SEQ ID NO: 360 - DNA, 20 bp, Artificial
  Synthetically generated peptide
gcggccttctgggagtagag

SEQ ID NO: 361 - DNA, 20 bp, Artificial
  Synthetically generated peptide
cggccttctgggagtagagg

SEQ ID NO: 362 - DNA, 20 bp, Artificial
  Synthetically generated peptide
ccccgcggccttctgggagt

SEQ ID NO: 363 - DNA, 20 bp, Artificial
  Synthetically generated peptide
cccccgcggccttctgggag

SEQ ID NO: 364 - DNA, 20 bp, Artificial
  Synthetically generated peptide
ccccccgcggccttctggga

SEQ ID NO: 365 - DNA, 20 bp, Artificial
  Synthetically generated peptide
accccccgcggccttctggg

SEQ ID NO: 366 - DNA, 20 bp, Artificial
  Synthetically generated peptide
caccccccgcggccttctgg

SEQ ID NO: 367 - DNA, 20 bp, Artificial
  Synthetically generated peptide
ccaccccccgcggccttctg

SEQ ID NO: 368 - DNA, 20 bp, Artificial
  Synthetically generated peptide
tccaccccccgcggccttct

SEQ ID NO: 369 - DNA, 20 bp, Artificial
  Synthetically generated peptide
gtccaccccccgcggccttc

SEQ ID NO: 370 - DNA, 20 bp, Artificial
  Synthetically generated peptide
ggtccaccccccgcggcctt

SEQ ID NO: 371 - DNA, 20 bp, Artificial
  Synthetically generated peptide
cggtccaccccccgcggcct

SEQ ID NO: 372 - DNA, 20 bp, Artificial
  Synthetically generated peptide
gcggtccaccccccgcggcc

SEQ ID NO: 373 - DNA, 20 bp, Artificial
  Synthetically generated peptide
ggcggtccaccccccgcggc

SEQ ID NO: 374 - DNA, 20 bp, Artificial
  Synthetically generated peptide
aggcggtccaccccccgcgg

SEQ ID NO: 375 - DNA, 20 bp, Artificial
  Synthetically generated peptide
taggcggtccaccccccgcg

SEQ ID NO: 376 - DNA, 20 bp, Artificial
  Synthetically generated peptide
ttaggcggtccaccccccgc

SEQ ID NO: 377 - DNA, 20 bp, Artificial
  Synthetically generated peptide
cttaggcggtccaccccccg

SEQ ID NO: 378 - DNA, 20 bp, Artificial
  Synthetically generated peptide
tcttaggcggtccacccccc

SEQ ID NO: 379 - DNA, 20 bp, Artificial
  Synthetically generated peptide
ctcttaggcggtccaccccc

SEQ ID NO: 380 - DNA, 20 bp, Artificial
  Synthetically generated peptide
cctcttaggcggtccacccc

SEQ ID NO: 381 - DNA, 20 bp, Artificial
  Synthetically generated peptide
ccctcttaggcggtccaccc

SEQ ID NO: 382 - DNA, 20 bp, Artificial
  Synthetically generated peptide
gccctcttaggcggtccacc

SEQ ID NO: 383 - DNA, 20 bp, Artificial
  Synthetically generated peptide
cgccctcttaggcggtccac

SEQ ID NO: 384 - DNA, 20 bp, Artificial
  Synthetically generated peptide
acgccctcttaggcggtcca

SEQ ID NO: 385 - DNA, 20 bp, Artificial
  Synthetically generated peptide
cacgccctcttaggcggtcc

SEQ ID NO: 386 - DNA, 20 bp, Artificial
  Synthetically generated peptide
gcacgccctcttaggcggtc

SEQ ID NO: 387 - DNA, 20 bp, Artificial
  Synthetically generated peptide
cgcacgccctcttaggcggt

SEQ ID NO: 388 - DNA, 20 bp, Artificial
  Synthetically generated peptide
gcgcacgccctcttaggcgg

SEQ ID NO: 389 - DNA, 20 bp, Artificial
  Synthetically generated peptide
agcgcacgccctcttaggcg

SEQ ID NO: 390 - DNA, 20 bp, Artificial
  Synthetically generated peptide
gagcgcacgccctcttaggc

SEQ ID NO: 391 - DNA, 20 bp, Artificial
  Synthetically generated peptide
ggagcgcacgccctcttagg

SEQ ID NO: 392 - DNA, 20 bp, Artificial
  Synthetically generated peptide
gggagcgcacgccctcttag

SEQ ID NO: 393 - DNA, 20 bp, Artificial
  Synthetically generated peptide
cgggagcgcacgccctctta

SEQ ID NO: 394 - DNA, 20 bp, Artificial
  Synthetically generated peptide
tcgggagcgcacgccctctt

SEQ ID NO: 395 - DNA, 20 bp, Artificial
  Synthetically generated peptide
gtcgggagcgcacgccctct

SEQ ID NO: 396 - DNA, 20 bp, Artificial
  Synthetically generated peptide
tgtcgggagcgcacgccctc

SEQ ID NO: 397 - DNA, 20 bp, Artificial
  Synthetically generated peptide
atgtcgggagcgcacgccct

SEQ ID NO: 398 - DNA, 20 bp, Artificial
  Synthetically generated peptide
catgtcgggagcgcacgccc

SEQ ID NO: 399 - DNA, 20 bp, Artificial
  Synthetically generated peptide
gcatgtcgggagcgcacgcc

SEQ ID NO: 400 - DNA, 20 bp, Artificial
  Synthetically generated peptide
ggcatgtcgggagcgcacgc

SEQ ID NO: 401 - DNA, 20 bp, Artificial
  Synthetically generated peptide
gggcatgtcgggagcgcacg

SEQ ID NO: 402 - DNA, 20 bp, Artificial
  Synthetically generated peptide
ggggcatgtcgggagcgcac

SEQ ID NO: 403 - DNA, 20 bp, Artificial
  Synthetically generated peptide
cggggcatgtcgggagcgca

SEQ ID NO: 404 - DNA, 20 bp, Artificial
  Synthetically generated peptide
gcggggcatgtcgggagcgc

SEQ ID NO: 405 - DNA, 20 bp, Artificial
  Synthetically generated peptide
cgcggggcatgtcgggagcg

SEQ ID NO: 406 - DNA, 20 bp, Artificial
  Synthetically generated peptide
ccgcggggcatgtcgggagc

SEQ ID NO: 407 - DNA, 20 bp, Artificial
  Synthetically generated peptide
gccgcggggcatgtcgggag

SEQ ID NO: 408 - DNA, 20 bp, Artificial
  Synthetically generated peptide
cgccgcggggcatgtcggga

SEQ ID NO: 409 - DNA, 20 bp, Artificial
  Synthetically generated peptide
gcgccgcggggcatgtcggg

SEQ ID NO: 410 - DNA, 20 bp, Artificial
  Synthetically generated peptide
cgcgccgcggggcatgtcgg

SEQ ID NO: 411 - DNA, 20 bp, Artificial
  Synthetically generated peptide
gcgcgccgcggggcatgtcg

SEQ ID NO: 412 - DNA, 20 bp, Artificial
  Synthetically generated peptide
ggcgcgccgcggggcatgtc

SEQ ID NO: 413 - DNA, 20 bp, Artificial
  Synthetically generated peptide
tggcgcgccgcggggcatgt

SEQ ID NO: 414 - DNA, 20 bp, Artificial
  Synthetically generated peptide
atggcgcgccgcggggcatg

SEQ ID NO: 415 - DNA, 20 bp, Artificial
  Synthetically generated peptide
aatggcgcgccgcggggcat

SEQ ID NO: 416 - DNA, 20 bp, Artificial
  Synthetically generated peptide
taatggcgcgccgcggggca

SEQ ID NO: 417 - DNA, 20 bp, Artificial
  Synthetically generated peptide
ttaatggcgcgccgcggggc

SEQ ID NO: 418 - DNA, 20 bp, Artificial
  Synthetically generated peptide
gttaatggcgcgccgcgggg

SEQ ID NO: 419 - DNA, 20 bp, Artificial
  Synthetically generated peptide
ggttaatggcgcgccgcggg

SEQ ID NO: 420 - DNA, 20 bp, Artificial
  Synthetically generated peptide
cggttaatggcgcgccgcgg

SEQ ID NO: 421 - DNA, 20 bp, Artificial
  Synthetically generated peptide
gcggttaatggcgcgccgcg

SEQ ID NO: 422 - DNA, 20 bp, Artificial
  Synthetically generated peptide
ggcggttaatggcgcgccgc

SEQ ID NO: 423 - DNA, 20 bp, Artificial
  Synthetically generated peptide
tggcggttaatggcgcgccg

SEQ ID NO: 424 - DNA, 20 bp, Artificial
  Synthetically generated peptide
ctggcggttaatggcgcgcc

SEQ ID NO: 425 - DNA, 20 bp, Artificial
  Synthetically generated peptide
tctggcggttaatggcgcgc

SEQ ID NO: 426 - DNA, 20 bp, Artificial
  Synthetically generated peptide
atctggcggttaatggcgcg

SEQ ID NO: 427 - DNA, 20 bp, Artificial
  Synthetically generated peptide
aatctggcggttaatggcgc

SEQ ID NO: 428 - DNA, 20 bp, Artificial
  Synthetically generated peptide
aaatctggcggttaatggcg

SEQ ID NO: 429 - DNA, 20 bp, Artificial
  Synthetically generated peptide
caaatctggcggttaatggc

SEQ ID NO: 430 - DNA, 20 bp, Artificial
  Synthetically generated peptide
tcaaatctggcggttaatgg

SEQ ID NO: 431 - DNA, 28 bp, Artificial
  Synthetically generated peptide
tcccggcgagtacatcgttgactgcacg

SEQ ID NO: 432 - DNA, 20 bp, Artificial
  Synthetically generated peptide
cccggcgagtacatcgttga

SEQ ID NO: 433 - DNA, 20 bp, Artificial
  Synthetically generated peptide
ccggcgagtacatcgttgac

SEQ ID NO: 434 - DNA, 20 bp, Artificial
  Synthetically generated peptide
cggcgagtacatcgttgact

SEQ ID NO: 435 - DNA, 20 bp, Artificial
  Synthetically generated peptide
ggcgagtacatcgttgactg

SEQ ID NO: 436 - DNA, 20 bp, Artificial
  Synthetically generated peptide
gcgagtacatcgttgactgc

SEQ ID NO: 437 - DNA, 20 bp, Artificial
  Synthetically generated peptide
cgagtacatcgttgactgca

SEQ ID NO: 438 - DNA, 20 bp, Artificial
  Synthetically generated peptide
gagtacatcgttgactgcac

SEQ ID NO: 439 - DNA, 20 bp, Artificial
  Synthetically generated peptide
agtacatcgttgactgcacg

SEQ ID NO: 440 - DNA, 20 bp, Artificial
  Synthetically generated peptide
gtacatcgttgactgcacga

SEQ ID NO: 441 - DNA, 20 bp, Artificial
  Synthetically generated peptide
tacatcgttgactgcacgac

SEQ ID NO: 442 - DNA, 20 bp, Artificial
  Synthetically generated peptide
acatcgttgactgcacgacc

SEQ ID NO: 443 - DNA, 20 bp, Artificial
  Synthetically generated peptide
catcgttgactgcacgacct

SEQ ID NO: 444 - DNA, 20 bp, Artificial
  Synthetically generated peptide
atcgttgactgcacgacctg

SEQ ID NO: 445 - DNA, 20 bp, Artificial
  Synthetically generated peptide
tcgttgactgcacgacctgg

SEQ ID NO: 446 - DNA, 20 bp, Artificial
  Synthetically generated peptide
cgttgactgcacgacctggg

SEQ ID NO: 447 - DNA, 20 bp, Artificial
  Synthetically generated peptide
gttgactgcacgacctgggt

SEQ ID NO: 448 - DNA, 20 bp, Artificial
  Synthetically generated peptide
ttgactgcacgacctgggtt

SEQ ID NO: 449 - DNA, 20 bp, Artificial
  Synthetically generated peptide
tgactgcacgacctgggttt

SEQ ID NO: 450 - DNA, 20 bp, Artificial
  Synthetically generated peptide
gactgcacgacctgggtttc

SEQ ID NO: 451 - DNA, 20 bp, Artificial
  Synthetically generated peptide
actgcacgacctgggtttcc

SEQ ID NO: 452 - DNA, 20 bp, Artificial
  Synthetically generated peptide
ctgcacgacctgggtttcca

SEQ ID NO: 453 - DNA, 20 bp, Artificial
  Synthetically generated peptide
tgcacgacctgggtttccag

SEQ ID NO: 454 - DNA, 20 bp, Artificial
  Synthetically generated peptide
gcacgacctgggtttccagg

SEQ ID NO: 455 - DNA, 20 bp, Artificial
  Synthetically generated peptide
cacgacctgggtttccagga

SEQ ID NO: 456 - DNA, 20 bp, Artificial
  Synthetically generated peptide
acgacctgggtttccaggag

SEQ ID NO: 457 - DNA, 20 bp, Artificial
  Synthetically generated peptide
cgacctgggtttccaggagg

SEQ ID NO: 458 - DNA, 20 bp, Artificial
  Synthetically generated peptide
gtcccggcgagtacatcgtt

SEQ ID NO: 459 - DNA, 20 bp, Artificial
  Synthetically generated peptide
tgtcccggcgagtacatcgt

SEQ ID NO: 460 - DNA, 20 bp, Artificial
  Synthetically generated peptide
ctgtcccggcgagtacatcg

SEQ ID NO: 461 - DNA, 20 bp, Artificial
  Synthetically generated peptide
gctgtcccggcgagtacatc

SEQ ID NO: 462 - DNA, 20 bp, Artificial
  Synthetically generated peptide
cgctgtcccggcgagtacat

SEQ ID NO: 463 - DNA, 20 bp, Artificial
  Synthetically generated peptide
tcgctgtcccggcgagtaca

SEQ ID NO: 464 - DNA, 20 bp, Artificial
  Synthetically generated peptide
atcgctgtcccggcgagtac

SEQ ID NO: 465 - DNA, 20 bp, Artificial
  Synthetically generated peptide
catcgctgtcccggcgagta

SEQ ID NO: 466 - DNA, 20 bp, Artificial
  Synthetically generated peptide
acatcgctgtcccggcgagt

SEQ ID NO: 467 - DNA, 20 bp, Artificial
  Synthetically generated peptide
gacatcgctgtcccggcgag

SEQ ID NO: 468 - DNA, 20 bp, Artificial
  Synthetically generated peptide
agacatcgctgtcccggcga

SEQ ID NO: 469 - DNA, 20 bp, Artificial
  Synthetically generated peptide
cagacatcgctgtcccggcg

SEQ ID NO: 470 - DNA, 20 bp, Artificial
  Synthetically generated peptide
gcagacatcgctgtcccggc

SEQ ID NO: 471 - DNA, 20 bp, Artificial
  Synthetically generated peptide
agcagacatcgctgtcccgg

SEQ ID NO: 472 - DNA, 20 bp, Artificial
  Synthetically generated peptide
cagcagacatcgctgtcccg

SEQ ID NO: 473 - DNA, 20 bp, Artificial
  Synthetically generated peptide
gcagcagacatcgctgtccc

SEQ ID NO: 474 - DNA, 20 bp, Artificial
  Synthetically generated peptide
tgcagcagacatcgctgtcc

SEQ ID NO: 475 - DNA, 20 bp, Artificial
  Synthetically generated peptide
gtgcagcagacatcgctgtc

SEQ ID NO: 476 - DNA, 20 bp, Artificial
  Synthetically generated peptide
agtgcagcagacatcgctgt

SEQ ID NO: 477 - DNA, 20 bp, Artificial
  Synthetically generated peptide
gagtgcagcagacatcgctg

SEQ ID NO: 478 - DNA, 20 bp, Artificial
  Synthetically generated peptide
ggagtgcagcagacatcgct

SEQ ID NO: 479 - DNA, 20 bp, Artificial
  Synthetically generated peptide
tggagtgcagcagacatcgc

SEQ ID NO: 480 - DNA, 20 bp, Artificial
  Synthetically generated peptide
atggagtgcagcagacatcg

SEQ ID NO: 481 - DNA, 22 bp, Artificial
  Synthetically generated peptide
aacctcctccccgccacgggtt

SEQ ID NO: 482 - DNA, 20 bp, Artificial
  Synthetically generated peptide
acctcctccccgccacgggt

SEQ ID NO: 483 - DNA, 20 bp, Artificial
  Synthetically generated peptide
cctcctccccgccacgggtt

SEQ ID NO: 484 - DNA, 20 bp, Artificial
  Synthetically generated peptide
ctcctccccgccacgggttc

SEQ ID NO: 485 - DNA, 20 bp, Artificial
  Synthetically generated peptide
tcctccccgccacgggttca

SEQ ID NO: 486 - DNA, 20 bp, Artificial
  Synthetically generated peptide
cctccccgccacgggttcaa

SEQ ID NO: 487 - DNA, 20 bp, Artificial
  Synthetically generated peptide
ctccccgccacgggttcaag

SEQ ID NO: 488 - DNA, 20 bp, Artificial
  Synthetically generated peptide
tccccgccacgggttcaagc

SEQ ID NO: 489 - DNA, 20 bp, Artificial
  Synthetically generated peptide
ccccgccacgggttcaagcg

SEQ ID NO: 490 - DNA, 20 bp, Artificial
  Synthetically generated peptide
cccgccacgggttcaagcga

SEQ ID NO: 491 - DNA, 20 bp, Artificial
  Synthetically generated peptide
ccgccacgggttcaagcgat

SEQ ID NO: 492 - DNA, 20 bp, Artificial
  Synthetically generated peptide
cgccacgggttcaagcgatt

SEQ ID NO: 493 - DNA, 20 bp, Artificial
  Synthetically generated peptide
gccacgggttcaagcgattc

SEQ ID NO: 494 - DNA, 20 bp, Artificial
  Synthetically generated peptide
ccacgggttcaagcgattct

SEQ ID NO: 495 - DNA, 20 bp, Artificial
  Synthetically generated peptide
cacgggttcaagcgattctc

SEQ ID NO: 496 - DNA, 20 bp, Artificial
  Synthetically generated peptide
acgggttcaagcgattctcc

SEQ ID NO: 497 - DNA, 20 bp, Artificial
  Synthetically generated peptide
cgggttcaagcgattctcct

SEQ ID NO: 498 - DNA, 19 bp, Artificial
  Synthetically generated peptide
ggttcaagcgattctcctg

SEQ ID NO: 499 - DNA, 20 bp, Artificial
  Synthetically generated peptide
ggttcaagcgattctcctgc

SEQ ID NO: 500 - DNA, 20 bp, Artificial
  Synthetically generated peptide
gttcaagcgattctcctgcc

SEQ ID NO: 501 - DNA, 20 bp, Artificial
  Synthetically generated peptide
ttcaagcgattctcctgcct

SEQ ID NO: 502 - DNA, 20 bp, Artificial
  Synthetically generated peptide
tcaagcgattctcctgcctc

SEQ ID NO: 503 - DNA, 20 bp, Artificial
  Synthetically generated peptide
caagcgattctcctgcctca

SEQ ID NO: 504 - DNA, 20 bp, Artificial
  Synthetically generated peptide
aagcgattctcctgcctcag

SEQ ID NO: 505 - DNA, 20 bp, Artificial
  Synthetically generated peptide
agcgattctcctgcctcagc

SEQ ID NO: 506 - DNA, 20 bp, Artificial
  Synthetically generated peptide
gcgattctcctgcctcagcc

SEQ ID NO: 507 - DNA, 20 bp, Artificial
  Synthetically generated peptide
cgattctcctgcctcagcct

SEQ ID NO: 508 - DNA, 20 bp, Artificial
  Synthetically generated peptide
caacctcctccccgccacgg

SEQ ID NO: 509 - DNA, 20 bp, Artificial
  Synthetically generated peptide
gcaacctcctccccgccacg

SEQ ID NO: 510 - DNA, 20 bp, Artificial
  Synthetically generated peptide
tgcaacctcctccccgccac

SEQ ID NO: 511 - DNA, 20 bp, Artificial
  Synthetically generated peptide
ctgcaacctcctccccgcca

SEQ ID NO: 512 - DNA, 20 bp, Artificial
  Synthetically generated peptide
actgcaacctcctccccgcc

SEQ ID NO: 513 - DNA, 20 bp, Artificial
  Synthetically generated peptide
cactgcaacctcctccccgc

SEQ ID NO: 514 - DNA, 20 bp, Artificial
  Synthetically generated peptide
tcactgcaacctcctccccg

SEQ ID NO: 515 - DNA, 27 bp, Artificial
  Synthetically generated peptide
cgacgcccttgacctccggcccggggt

SEQ ID NO: 516 - DNA, 20 bp, Artificial
  Synthetically generated peptide
gacgcccttgacctccggcc

SEQ ID NO: 517 - DNA, 20 bp, Artificial
  Synthetically generated peptide
acgcccttgacctccggccc

SEQ ID NO: 518 - DNA, 20 bp, Artificial
  Synthetically generated peptide
cgcccttgacctccggcccg

SEQ ID NO: 519 - DNA, 20 bp, Artificial
  Synthetically generated peptide
gcccttgacctccggcccgg

SEQ ID NO: 520 - DNA, 20 bp, Artificial
  Synthetically generated peptide
cccttgacctccggcccggg

SEQ ID NO: 521 - DNA, 20 bp, Artificial
  Synthetically generated peptide
ccttgacctccggcccgggg

SEQ ID NO: 522 - DNA, 20 bp, Artificial
  Synthetically generated peptide
cttgacctccggcccggggt

SEQ ID NO: 523 - DNA, 20 bp, Artificial
  Synthetically generated peptide
ttgacctccggcccggggtt

SEQ ID NO: 524 - DNA, 20 bp, Artificial
  Synthetically generated peptide
tgacctccggcccggggtta

SEQ ID NO: 525 - DNA, 20 bp, Artificial
  Synthetically generated peptide
gacctccggcccggggttac

SEQ ID NO: 526 - DNA, 20 bp, Artificial
  Synthetically generated peptide
acctccggcccggggttacc

SEQ ID NO: 527 - DNA, 20 bp, Artificial
  Synthetically generated peptide
cctccggcccggggttacca

SEQ ID NO: 528 - DNA, 20 bp, Artificial
  Synthetically generated peptide
ctccggcccggggttaccac

SEQ ID NO: 529 - DNA, 20 bp, Artificial
  Synthetically generated peptide
tccggcccggggttaccaca

SEQ ID NO: 530 - DNA, 20 bp, Artificial
  Synthetically generated peptide
ccggcccggggttaccacat

SEQ ID NO: 531 - DNA, 20 bp, Artificial
  Synthetically generated peptide
cggcccggggttaccacatg

SEQ ID NO: 532 - DNA, 20 bp, Artificial
  Synthetically generated peptide
ggcccggggttaccacatgc

SEQ ID NO: 533 - DNA, 20 bp, Artificial
  Synthetically generated peptide
gcccggggttaccacatgcc

SEQ ID NO: 534 - DNA, 20 bp, Artificial
  Synthetically generated peptide
cccggggttaccacatgcct

SEQ ID NO: 535 - DNA, 20 bp, Artificial
  Synthetically generated peptide
ccggggttaccacatgcctt

SEQ ID NO: 536 - DNA, 20 bp, Artificial
  Synthetically generated peptide
cggggttaccacatgccttg

SEQ ID NO: 537 - DNA, 20 bp, Artificial
  Synthetically generated peptide
gcgacgcccttgacctccgg

SEQ ID NO: 538 - DNA, 20 bp, Artificial
  Synthetically generated peptide
agcgacgcccttgacctccg

SEQ ID NO: 539 - DNA, 20 bp, Artificial
  Synthetically generated peptide
aagcgacgcccttgacctcc

SEQ ID NO: 540 - DNA, 20 bp, Artificial
  Synthetically generated peptide
gaagcgacgcccttgacctc

SEQ ID NO: 541 - DNA, 20 bp, Artificial
  Synthetically generated peptide
agaagcgacgcccttgacct

SEQ ID NO: 542 - DNA, 20 bp, Artificial
  Synthetically generated peptide
gagaagcgacgcccttgacc

SEQ ID NO: 543 - DNA, 20 bp, Artificial
  Synthetically generated peptide
ggagaagcgacgcccttgac

SEQ ID NO: 544 - DNA, 20 bp, Artificial
  Synthetically generated peptide
gggagaagcgacgcccttga

SEQ ID NO: 545 - DNA, 20 bp, Artificial
  Synthetically generated peptide
agggagaagcgacgcccttg

SEQ ID NO: 546 - DNA, 20 bp, Artificial
  Synthetically generated peptide
tagggagaagcgacgccctt

SEQ ID NO: 547 - DNA, 20 bp, Artificial
  Synthetically generated peptide
ttagggagaagcgacgccct

SEQ ID NO: 548 - DNA, 20 bp, Artificial
  Synthetically generated peptide
attagggagaagcgacgccc

SEQ ID NO: 549 - DNA, 20 bp, Artificial
  Synthetically generated peptide
cattagggagaagcgacgcc

SEQ ID NO: 550 - DNA, 24 bp, Artificial
  Synthetically generated peptide
ctgcgccgttccctctaggaatgg

SEQ ID NO: 551 - DNA, 20 bp, Artificial
  Synthetically generated peptide
tgcgccgttccctctaggaa

SEQ ID NO: 552 - DNA, 20 bp, Artificial
  Synthetically generated peptide
gcgccgttccctctaggaat

SEQ ID NO: 553 - DNA, 20 bp, Artificial
  Synthetically generated peptide
cgccgttccctctaggaatg

SEQ ID NO: 554 - DNA, 20 bp, Artificial
  Synthetically generated peptide
gccgttccctctaggaatgg

SEQ ID NO: 555 - DNA, 20 bp, Artificial
  Synthetically generated peptide
ccgttccctctaggaatggt

SEQ ID NO: 556 - DNA, 20 bp, Artificial
  Synthetically generated peptide
cgttccctctaggaatggta

SEQ ID NO: 557 - DNA, 20 bp, Artificial
  Synthetically generated peptide
cctgcgccgttccctctagg

SEQ ID NO: 558 - DNA, 20 bp, Artificial
  Synthetically generated peptide
acctgcgccgttccctctag

SEQ ID NO: 559 - DNA, 20 bp, Artificial
  Synthetically generated peptide
aacctgcgccgttccctcta

SEQ ID NO: 560 - DNA, 20 bp, Artificial
  Synthetically generated peptide
caacctgcgccgttccctct

SEQ ID NO: 561 - DNA, 20 bp, Artificial
  Synthetically generated peptide
ccaacctgcgccgttccctc

SEQ ID NO: 562 - DNA, 20 bp, Artificial
  Synthetically generated peptide
cccaacctgcgccgttccct

SEQ ID NO: 563 - DNA, 20 bp, Artificial
  Synthetically generated peptide
tcccaacctgcgccgttccc

SEQ ID NO: 564 - DNA, 20 bp, Artificial
  Synthetically generated peptide
gtcccaacctgcgccgttcc

SEQ ID NO: 565 - DNA, 20 bp, Artificial
  Synthetically generated peptide
agtcccaacctgcgccgttc

SEQ ID NO: 566 - DNA, 20 bp, Artificial
  Synthetically generated peptide
aagtcccaacctgcgccgtt

SEQ ID NO: 567 - DNA, 20 bp, Artificial
  Synthetically generated peptide
gaagtcccaacctgcgccgt

SEQ ID NO: 568 - DNA, 20 bp, Artificial
  Synthetically generated peptide
ggaagtcccaacctgcgccg

SEQ ID NO: 569 - DNA, 20 bp, Artificial
  Synthetically generated peptide
gggaagtcccaacctgcgcc

SEQ ID NO: 570 - DNA, 20 bp, Artificial
  Synthetically generated peptide
agggaagtcccaacctgcgc

SEQ ID NO: 571 - DNA, 20 bp, Artificial
  Synthetically generated peptide
gagggaagtcccaacctgcg

SEQ ID NO: 572 - DNA, 28 bp, Artificial
  Synthetically generated peptide
gaagcgacgcccttgacctccggcccgg

SEQ ID NO: 573 - DNA, 20 bp, Artificial
  Synthetically generated peptide
aagcgacgcccttgacctcc

SEQ ID NO: 574 - DNA, 20 bp, Artificial
  Synthetically generated peptide
agcgacgcccttgacctccg

SEQ ID NO: 575 - DNA, 20 bp, Artificial
  Synthetically generated peptide
gcgacgcccttgacctccgg

SEQ ID NO: 576 - DNA, 20 bp, Artificial
  Synthetically generated peptide
cgacgcccttgacctccggc

SEQ ID NO: 577 - DNA, 20 bp, Artificial
  Synthetically generated peptide
gacgcccttgacctccggcc

SEQ ID NO: 578 - DNA, 20 bp, Artificial
  Synthetically generated peptide
acgcccttgacctccggccc

SEQ ID NO: 579 - DNA, 20 bp, Artificial
  Synthetically generated peptide
cgcccttgacctccggcccg

SEQ ID NO: 580 - DNA, 20 bp, Artificial
  Synthetically generated peptide
gcccttgacctccggcccgg

SEQ ID NO: 581 - DNA, 20 bp, Artificial
  Synthetically generated peptide
cccttgacctccggcccggg

SEQ ID NO: 582 - DNA, 20 bp, Artificial
  Synthetically generated peptide
ccttgacctccggcccgggg

SEQ ID NO: 583 - DNA, 20 bp, Artificial
  Synthetically generated peptide
cttgacctccggcccggggt

SEQ ID NO: 584 - DNA, 20 bp, Artificial
  Synthetically generated peptide
ttgacctccggcccggggtt

SEQ ID NO: 585 - DNA, 20 bp, Artificial
  Synthetically generated peptide
tgacctccggcccggggtta

SEQ ID NO: 586 - DNA, 20 bp, Artificial
  Synthetically generated peptide
gacctccggcccggggttac

SEQ ID NO: 587 - DNA, 20 bp, Artificial
  Synthetically generated peptide
acctccggcccggggttacc

SEQ ID NO: 588 - DNA, 20 bp, Artificial
  Synthetically generated peptide
cctccggcccggggttacca

SEQ ID NO: 589 - DNA, 20 bp, Artificial
  Synthetically generated peptide
ctccggcccggggttaccac

SEQ ID NO: 590 - DNA, 20 bp, Artificial
  Synthetically generated peptide
tccggcccggggttaccaca

SEQ ID NO: 591 - DNA, 20 bp, Artificial
  Synthetically generated peptide
ccggcccggggttaccacat

SEQ ID NO: 592 - DNA, 20 bp, Artificial
  Synthetically generated peptide
cggcccggggttaccacatg

SEQ ID NO: 593 - DNA, 20 bp, Artificial
  Synthetically generated peptide
ggcccggggttaccacatgc

SEQ ID NO: 594 - DNA, 20 bp, Artificial
  Synthetically generated peptide
gcccggggttaccacatgcc

SEQ ID NO: 595 - DNA, 20 bp, Artificial
  Synthetically generated peptide
cccggggttaccacatgcct

SEQ ID NO: 596 - DNA, 20 bp, Artificial
  Synthetically generated peptide
ccggggttaccacatgcctt

SEQ ID NO: 597 - DNA, 20 bp, Artificial
  Synthetically generated peptide
cggggttaccacatgccttg

SEQ ID NO: 598 - DNA, 20 bp, Artificial
  Synthetically generated peptide
agaagcgacgcccttgacct

SEQ ID NO: 599 - DNA, 20 bp, Artificial
  Synthetically generated peptide
gagaagcgacgcccttgacc

SEQ ID NO: 600 - DNA, 20 bp, Artificial
  Synthetically generated peptide
ggagaagcgacgcccttgac

SEQ ID NO: 601 - DNA, 20 bp, Artificial
  Synthetically generated peptide
gggagaagcgacgcccttga

SEQ ID NO: 602 - DNA, 20 bp, Artificial
  Synthetically generated peptide
agggagaagcgacgcccttg

SEQ ID NO: 603 - DNA, 20 bp, Artificial
  Synthetically generated peptide
tagggagaagcgacgccctt

SEQ ID NO: 604 - DNA, 20 bp, Artificial
  Synthetically generated peptide
ttagggagaagcgacgccct

SEQ ID NO: 605 - DNA, 20 bp, Artificial
  Synthetically generated peptide
attagggagaagcgacgccc

SEQ ID NO: 606 - DNA, 20 bp, Artificial
  Synthetically generated peptide
cattagggagaagcgacgcc

SEQ ID NO: 607 - DNA, 23 bp, Artificial
  Synthetically generated peptide
cccccgatgctcttcacctcggg

SEQ ID NO: 608 - DNA, 20 bp, Artificial
  Synthetically generated peptide
ccccgatgctcttcacctcg

SEQ ID NO: 609 - DNA, 20 bp, Artificial
  Synthetically generated peptide
cccgatgctcttcacctcgg

SEQ ID NO: 610 - DNA, 20 bp, Artificial
  Synthetically generated peptide
ccgatgctcttcacctcggg

SEQ ID NO: 611 - DNA, 20 bp, Artificial
  Synthetically generated peptide
cgatgctcttcacctcggga

SEQ ID NO: 612 - DNA, 20 bp, Artificial
  Synthetically generated peptide
gatgctcttcacctcgggag

SEQ ID NO: 613 - DNA, 20 bp, Artificial
  Synthetically generated peptide
atgctcttcacctcgggagc

SEQ ID NO: 614 - DNA, 20 bp, Artificial
  Synthetically generated peptide
tgctcttcacctcgggagcc

SEQ ID NO: 615 - DNA, 20 bp, Artificial
  Synthetically generated peptide
gctcttcacctcgggagccc

SEQ ID NO: 616 - DNA, 20 bp, Artificial
  Synthetically generated peptide
ctcttcacctcgggagcccg

SEQ ID NO: 617 - DNA, 20 bp, Artificial
  Synthetically generated peptide
tcttcacctcgggagcccgg

SEQ ID NO: 618 - DNA, 20 bp, Artificial
  Synthetically generated peptide
cttcacctcgggagcccgga

SEQ ID NO: 619 - DNA, 20 bp, Artificial
  Synthetically generated peptide
ttcacctcgggagcccggag

SEQ ID NO: 620 - DNA, 20 bp, Artificial
  Synthetically generated peptide
tcacctcgggagcccggagc

SEQ ID NO: 621 - DNA, 20 bp, Artificial
  Synthetically generated peptide
cacctcgggagcccggagcc

SEQ ID NO: 622 - DNA, 20 bp, Artificial
  Synthetically generated peptide
acctcgggagcccggagccc

SEQ ID NO: 623 - DNA, 20 bp, Artificial
  Synthetically generated peptide
cctcgggagcccggagcccg

SEQ ID NO: 624 - DNA, 20 bp, Artificial
  Synthetically generated peptide
ctcgggagcccggagcccgt

SEQ ID NO: 625 - DNA, 20 bp, Artificial
  Synthetically generated peptide
tcgggagcccggagcccgtc

SEQ ID NO: 626 - DNA, 20 bp, Artificial
  Synthetically generated peptide
cgggagcccggagcccgtca

SEQ ID NO: 627 - DNA, 20 bp, Artificial
  Synthetically generated peptide
gggagcccggagcccgtcac

SEQ ID NO: 628 - DNA, 20 bp, Artificial
  Synthetically generated peptide
ggagcccggagcccgtcacc

SEQ ID NO: 629 - DNA, 20 bp, Artificial
  Synthetically generated peptide
gagcccggagcccgtcaccc

SEQ ID NO: 630 - DNA, 20 bp, Artificial
  Synthetically generated peptide
agcccggagcccgtcaccca

SEQ ID NO: 631 - DNA, 20 bp, Artificial
  Synthetically generated peptide
gcccggagcccgtcacccaa

SEQ ID NO: 632 - DNA, 20 bp, Artificial
  Synthetically generated peptide
cccggagcccgtcacccaag

SEQ ID NO: 633 - DNA, 20 bp, Artificial
  Synthetically generated peptide
ccggagcccgtcacccaagt

SEQ ID NO: 634 - DNA, 20 bp, Artificial
  Synthetically generated peptide
cggagcccgtcacccaagtc

SEQ ID NO: 635 - DNA, 20 bp, Artificial
  Synthetically generated peptide
ggagcccgtcacccaagtcc

SEQ ID NO: 636 - DNA, 20 bp, Artificial
  Synthetically generated peptide
gagcccgtcacccaagtccg

SEQ ID NO: 637 - DNA, 20 bp, Artificial
  Synthetically generated peptide
agcccgtcacccaagtccgg

SEQ ID NO: 638 - DNA, 20 bp, Artificial
  Synthetically generated peptide
gcccgtcacccaagtccggt

SEQ ID NO: 639 - DNA, 20 bp, Artificial
  Synthetically generated peptide
cccgtcacccaagtccggtc

SEQ ID NO: 640 - DNA, 20 bp, Artificial
  Synthetically generated peptide
ccgtcacccaagtccggtct

SEQ ID NO: 641 - DNA, 20 bp, Artificial
  Synthetically generated peptide
cgtcacccaagtccggtcta

SEQ ID NO: 642 - DNA, 20 bp, Artificial
  Synthetically generated peptide
gtcacccaagtccggtctac

SEQ ID NO: 643 - DNA, 20 bp, Artificial
  Synthetically generated peptide
tcacccaagtccggtctacc

SEQ ID NO: 644 - DNA, 20 bp, Artificial
  Synthetically generated peptide
cacccaagtccggtctaccg

SEQ ID NO: 645 - DNA, 20 bp, Artificial
  Synthetically generated peptide
acccaagtccggtctaccgc

SEQ ID NO: 646 - DNA, 20 bp, Artificial
  Synthetically generated peptide
cccaagtccggtctaccgcg

SEQ ID NO: 647 - DNA, 20 bp, Artificial
  Synthetically generated peptide
ccaagtccggtctaccgcgg

SEQ ID NO: 648 - DNA, 20 bp, Artificial
  Synthetically generated peptide
caagtccggtctaccgcgga

SEQ ID NO: 649 - DNA, 20 bp, Artificial
  Synthetically generated peptide
aagtccggtctaccgcggag

SEQ ID NO: 650 - DNA, 20 bp, Artificial
  Synthetically generated peptide
agtccggtctaccgcggagg

SEQ ID NO: 651 - DNA, 20 bp, Artificial
  Synthetically generated peptide
gtccggtctaccgcggaggc

SEQ ID NO: 652 - DNA, 20 bp, Artificial
  Synthetically generated peptide
tccggtctaccgcggaggca

SEQ ID NO: 653 - DNA, 20 bp, Artificial
  Synthetically generated peptide
ccggtctaccgcggaggcac

SEQ ID NO: 654 - DNA, 20 bp, Artificial
  Synthetically generated peptide
cggtctaccgcggaggcact

SEQ ID NO: 655 - DNA, 20 bp, Artificial
  Synthetically generated peptide
ggtctaccgcggaggcactg

SEQ ID NO: 656 - DNA, 20 bp, Artificial
  Synthetically generated peptide
gtctaccgcggaggcactgt

SEQ ID NO: 657 - DNA, 20 bp, Artificial
  Synthetically generated peptide
tctaccgcggaggcactgtg

SEQ ID NO: 658 - DNA, 20 bp, Artificial
  Synthetically generated peptide
ctaccgcggaggcactgtgg

SEQ ID NO: 659 - DNA, 20 bp, Artificial
  Synthetically generated peptide
taccgcggaggcactgtggc

SEQ ID NO: 660 - DNA, 20 bp, Artificial
  Synthetically generated peptide
accgcggaggcactgtggcc

SEQ ID NO: 661 - DNA, 20 bp, Artificial
  Synthetically generated peptide
ccgcggaggcactgtggcct

SEQ ID NO: 662 - DNA, 20 bp, Artificial
  Synthetically generated peptide
cgcggaggcactgtggcctc

SEQ ID NO: 663 - DNA, 20 bp, Artificial
  Synthetically generated peptide
gcggaggcactgtggcctcg

SEQ ID NO: 664 - DNA, 20 bp, Artificial
  Synthetically generated peptide
cggaggcactgtggcctcgg

SEQ ID NO: 665 - DNA, 20 bp, Artificial
  Synthetically generated peptide
ggaggcactgtggcctcggg

SEQ ID NO: 666 - DNA, 20 bp, Artificial
  Synthetically generated peptide
gaggcactgtggcctcgggt

SEQ ID NO: 667 - DNA, 20 bp, Artificial
  Synthetically generated peptide
aggcactgtggcctcgggtc

SEQ ID NO: 668 - DNA, 20 bp, Artificial
  Synthetically generated peptide
ggcactgtggcctcgggtcg

SEQ ID NO: 669 - DNA, 20 bp, Artificial
  Synthetically generated peptide
gcactgtggcctcgggtcgg

SEQ ID NO: 670 - DNA, 20 bp, Artificial
  Synthetically generated peptide
cactgtggcctcgggtcggc

SEQ ID NO: 671 - DNA, 20 bp, Artificial
  Synthetically generated peptide
actgtggcctcgggtcggcc

SEQ ID NO: 672 - DNA, 20 bp, Artificial
  Synthetically generated peptide
ctgtggcctcgggtcggccc

SEQ ID NO: 673 - DNA, 20 bp, Artificial
  Synthetically generated peptide
tgtggcctcgggtcggcccc

SEQ ID NO: 674 - DNA, 20 bp, Artificial
  Synthetically generated peptide
gtggcctcgggtcggccccg

SEQ ID NO: 675 - DNA, 20 bp, Artificial
  Synthetically generated peptide
tggcctcgggtcggccccgg

SEQ ID NO: 676 - DNA, 20 bp, Artificial
  Synthetically generated peptide
ggcctcgggtcggccccgga

SEQ ID NO: 677 - DNA, 20 bp, Artificial
  Synthetically generated peptide
gcctcgggtcggccccggag

SEQ ID NO: 678 - DNA, 20 bp, Artificial
  Synthetically generated peptide
cctcgggtcggccccggagc

SEQ ID NO: 679 - DNA, 20 bp, Artificial
  Synthetically generated peptide
ctcgggtcggccccggagcg

SEQ ID NO: 680 - DNA, 20 bp, Artificial
  Synthetically generated peptide
tcgggtcggccccggagcga

SEQ ID NO: 681 - DNA, 20 bp, Artificial
  Synthetically generated peptide
cgggtcggccccggagcgag

SEQ ID NO: 682 - DNA, 20 bp, Artificial
  Synthetically generated peptide
gggtcggccccggagcgagg

SEQ ID NO: 683 - DNA, 20 bp, Artificial
  Synthetically generated peptide
ggtcggccccggagcgaggc

SEQ ID NO: 684 - DNA, 20 bp, Artificial
  Synthetically generated peptide
gtcggccccggagcgaggcc

SEQ ID NO: 685 - DNA, 20 bp, Artificial
  Synthetically generated peptide
tcggccccggagcgaggcct

SEQ ID NO: 686 - DNA, 20 bp, Artificial
  Synthetically generated peptide
cggccccggagcgaggcctc

SEQ ID NO: 687 - DNA, 20 bp, Artificial
  Synthetically generated peptide
ggccccggagcgaggcctcc

SEQ ID NO: 688 - DNA, 20 bp, Artificial
  Synthetically generated peptide
gccccggagcgaggcctcca

SEQ ID NO: 689 - DNA, 20 bp, Artificial
  Synthetically generated peptide
ccccggagcgaggcctccag

SEQ ID NO: 690 - DNA, 20 bp, Artificial
  Synthetically generated peptide
cccggagcgaggcctccaga

SEQ ID NO: 691 - DNA, 20 bp, Artificial
  Synthetically generated peptide
ccggagcgaggcctccagaa

SEQ ID NO: 692 - DNA, 20 bp, Artificial
  Synthetically generated peptide
cggagcgaggcctccagaac

SEQ ID NO: 693 - DNA, 20 bp, Artificial
  Synthetically generated peptide
ggagcgaggcctccagaact

SEQ ID NO: 694 - DNA, 20 bp, Artificial
  Synthetically generated peptide
gagcgaggcctccagaacta

SEQ ID NO: 695 - DNA, 20 bp, Artificial
  Synthetically generated peptide
agcgaggcctccagaactac

SEQ ID NO: 696 - DNA, 20 bp, Artificial
  Synthetically generated peptide
gcgaggcctccagaactacc

SEQ ID NO: 697 - DNA, 20 bp, Artificial
  Synthetically generated peptide
cgaggcctccagaactacca

SEQ ID NO: 698 - DNA, 20 bp, Artificial
  Synthetically generated peptide
gcccccgatgctcttcacct

SEQ ID NO: 699 - DNA, 20 bp, Artificial
  Synthetically generated peptide
agcccccgatgctcttcacc

SEQ ID NO: 700 - DNA, 20 bp, Artificial
  Synthetically generated peptide
cagcccccgatgctcttcac

SEQ ID NO: 701 - DNA, 20 bp, Artificial
  Synthetically generated peptide
tcagcccccgatgctcttca

SEQ ID NO: 702 - DNA, 20 bp, Artificial
  Synthetically generated peptide
ctcagcccccgatgctcttc

SEQ ID NO: 703 - DNA, 20 bp, Artificial
  Synthetically generated peptide
cctcagcccccgatgctctt

SEQ ID NO: 704 - DNA, 20 bp, Artificial
  Synthetically generated peptide
acctcagcccccgatgctct

SEQ ID NO: 705 - DNA, 20 bp, Artificial
  Synthetically generated peptide
cacctcagcccccgatgctc

SEQ ID NO: 706 - DNA, 20 bp, Artificial
  Synthetically generated peptide
ccacctcagcccccgatgct

SEQ ID NO: 707 - DNA, 20 bp, Artificial
  Synthetically generated peptide
cccacctcagcccccgatgc

SEQ ID NO: 708 - DNA, 20 bp, Artificial
  Synthetically generated peptide
tcccacctcagcccccgatg

SEQ ID NO: 709 - DNA, 20 bp, Artificial
  Synthetically generated peptide
gtcccacctcagcccccgat

SEQ ID NO: 710 - DNA, 20 bp, Artificial
  Synthetically generated peptide
ggtcccacctcagcccccga

SEQ ID NO: 711 - DNA, 20 bp, Artificial
  Synthetically generated peptide
aggtcccacctcagcccccg

SEQ ID NO: 712 - DNA, 23 bp, Artificial
  Synthetically generated peptide
cgggtcggccccggagcgaggcc

SEQ ID NO: 713 - DNA, 20 bp, Artificial
  Synthetically generated peptide
gggtcggccccggagcgagg

SEQ ID NO: 714 - DNA, 20 bp, Artificial
  Synthetically generated peptide
ggtcggccccggagcgaggc

SEQ ID NO: 715 - DNA, 20 bp, Artificial
  Synthetically generated peptide
gtcggccccggagcgaggcc

SEQ ID NO: 716 - DNA, 20 bp, Artificial
  Synthetically generated peptide
tcggccccggagcgaggcct

SEQ ID NO: 717 - DNA, 20 bp, Artificial
  Synthetically generated peptide
cggccccggagcgaggcctc

SEQ ID NO: 718 - DNA, 20 bp, Artificial
  Synthetically generated peptide
ggccccggagcgaggcctcc

SEQ ID NO: 719 - DNA, 20 bp, Artificial
  Synthetically generated peptide
gccccggagcgaggcctcca

SEQ ID NO: 720 - DNA, 20 bp, Artificial
  Synthetically generated peptide
ccccggagcgaggcctccag

SEQ ID NO: 721 - DNA, 20 bp, Artificial
  Synthetically generated peptide
cccggagcgaggcctccaga

SEQ ID NO: 722 - DNA, 20 bp, Artificial
  Synthetically generated peptide
ccggagcgaggcctccagaa

SEQ ID NO: 723 - DNA, 20 bp, Artificial
  Synthetically generated peptide
cggagcgaggcctccagaac

SEQ ID NO: 724 - DNA, 20 bp, Artificial
  Synthetically generated peptide
ggagcgaggcctccagaact

SEQ ID NO: 725 - DNA, 20 bp, Artificial
  Synthetically generated peptide
gagcgaggcctccagaacta

SEQ ID NO: 726 - DNA, 20 bp, Artificial
  Synthetically generated peptide
agcgaggcctccagaactac

SEQ ID NO: 727 - DNA, 20 bp, Artificial
  Synthetically generated peptide
gcgaggcctccagaactacc

SEQ ID NO: 728 - DNA, 20 bp, Artificial
  Synthetically generated peptide
cgaggcctccagaactacca

SEQ ID NO: 729 - DNA, 20 bp, Artificial
  Synthetically generated peptide
tcgggtcggccccggagcga

SEQ ID NO: 730 - DNA, 20 bp, Artificial
  Synthetically generated peptide
ctcgggtcggccccggagcg

SEQ ID NO: 731 - DNA, 20 bp, Artificial
  Synthetically generated peptide
cctcgggtcggccccggagc

SEQ ID NO: 732 - DNA, 20 bp, Artificial
  Synthetically generated peptide
gcctcgggtcggccccggag

SEQ ID NO: 733 - DNA, 20 bp, Artificial
  Synthetically generated peptide
ggcctcgggtcggccccgga

SEQ ID NO: 734 - DNA, 20 bp, Artificial
  Synthetically generated peptide
tggcctcgggtcggccccgg

SEQ ID NO: 735 - DNA, 20 bp, Artificial
  Synthetically generated peptide
gtggcctcgggtcggccccg

SEQ ID NO: 736 - DNA, 20 bp, Artificial
  Synthetically generated peptide
tgtggcctcgggtcggcccc

SEQ ID NO: 737 - DNA, 20 bp, Artificial
  Synthetically generated peptide
ctgtggcctcgggtcggccc

SEQ ID NO: 738 - DNA, 20 bp, Artificial
  Synthetically generated peptide
actgtggcctcgggtcggcc

SEQ ID NO: 739 - DNA, 20 bp, Artificial
  Synthetically generated peptide
cactgtggcctcgggtcggc

SEQ ID NO: 740 - DNA, 20 bp, Artificial
  Synthetically generated peptide
gcactgtggcctcgggtcgg

SEQ ID NO: 741 - DNA, 20 bp, Artificial
  Synthetically generated peptide
ggcactgtggcctcgggtcg

SEQ ID NO: 742 - DNA, 20 bp, Artificial
  Synthetically generated peptide
aggcactgtggcctcgggtc

SEQ ID NO: 743 - DNA, 20 bp, Artificial
  Synthetically generated peptide
gaggcactgtggcctcgggt

SEQ ID NO: 744 - DNA, 20 bp, Artificial
  Synthetically generated peptide
ggaggcactgtggcctcggg

SEQ ID NO: 745 - DNA, 20 bp, Artificial
  Synthetically generated peptide
cggaggcactgtggcctcgg

SEQ ID NO: 746 - DNA, 20 bp, Artificial
  Synthetically generated peptide
gcggaggcactgtggcctcg

SEQ ID NO: 747 - DNA, 20 bp, Artificial
  Synthetically generated peptide
cgcggaggcactgtggcctc

SEQ ID NO: 748 - DNA, 20 bp, Artificial
  Synthetically generated peptide
ccgcggaggcactgtggcct

SEQ ID NO: 749 - DNA, 20 bp, Artificial
  Synthetically generated peptide
accgcggaggcactgtggcc

SEQ ID NO: 750 - DNA, 20 bp, Artificial
  Synthetically generated peptide
taccgcggaggcactgtggc

SEQ ID NO: 751 - DNA, 20 bp, Artificial
  Synthetically generated peptide
ctaccgcggaggcactgtgg

SEQ ID NO: 752 - DNA, 20 bp, Artificial
  Synthetically generated peptide
tctaccgcggaggcactgtg

SEQ ID NO: 753 - DNA, 20 bp, Artificial
  Synthetically generated peptide
gtctaccgcggaggcactgt

SEQ ID NO: 754 - DNA, 20 bp, Artificial
  Synthetically generated peptide
ggtctaccgcggaggcactg

SEQ ID NO: 755 - DNA, 20 bp, Artificial
  Synthetically generated peptide
cggtctaccgcggaggcact

SEQ ID NO: 756 - DNA, 20 bp, Artificial
  Synthetically generated peptide
ccggtctaccgcggaggcac

SEQ ID NO: 757 - DNA, 20 bp, Artificial
  Synthetically generated peptide
tccggtctaccgcggaggca

SEQ ID NO: 758 - DNA, 20 bp, Artificial
  Synthetically generated peptide
gtccggtctaccgcggaggc

SEQ ID NO: 759 - DNA, 20 bp, Artificial
  Synthetically generated peptide
agtccggtctaccgcggagg

SEQ ID NO: 760 - DNA, 20 bp, Artificial
  Synthetically generated peptide
aagtccggtctaccgcggag

SEQ ID NO: 761 - DNA, 20 bp, Artificial
  Synthetically generated peptide
caagtccggtctaccgcgga

SEQ ID NO: 762 - DNA, 20 bp, Artificial
  Synthetically generated peptide
ccaagtccggtctaccgcgg

SEQ ID NO: 763 - DNA, 20 bp, Artificial
  Synthetically generated peptide
cccaagtccggtctaccgcg

SEQ ID NO: 764 - DNA, 20 bp, Artificial
  Synthetically generated peptide
acccaagtccggtctaccgc

SEQ ID NO: 765 - DNA, 20 bp, Artificial
  Synthetically generated peptide
cacccaagtccggtctaccg

SEQ ID NO: 766 - DNA, 20 bp, Artificial
  Synthetically generated peptide
tcacccaagtccggtctacc

SEQ ID NO: 767 - DNA, 20 bp, Artificial
  Synthetically generated peptide
gtcacccaagtccggtctac

SEQ ID NO: 768 - DNA, 20 bp, Artificial
  Synthetically generated peptide
cgtcacccaagtccggtcta

SEQ ID NO: 769 - DNA, 20 bp, Artificial
  Synthetically generated peptide
ccgtcacccaagtccggtct

SEQ ID NO: 770 - DNA, 20 bp, Artificial
  Synthetically generated peptide
cccgtcacccaagtccggtc

SEQ ID NO: 771 - DNA, 20 bp, Artificial
  Synthetically generated peptide
gcccgtcacccaagtccggt

SEQ ID NO: 772 - DNA, 20 bp, Artificial
  Synthetically generated peptide
agcccgtcacccaagtccgg

SEQ ID NO: 773 - DNA, 20 bp, Artificial
  Synthetically generated peptide
gagcccgtcacccaagtccg

SEQ ID NO: 774 - DNA, 20 bp, Artificial
  Synthetically generated peptide
ggagcccgtcacccaagtcc

SEQ ID NO: 775 - DNA, 20 bp, Artificial
  Synthetically generated peptide
cggagcccgtcacccaagtc

SEQ ID NO: 776 - DNA, 20 bp, Artificial
  Synthetically generated peptide
ccggagcccgtcacccaagt

SEQ ID NO: 777 - DNA, 20 bp, Artificial
  Synthetically generated peptide
cccggagcccgtcacccaag

SEQ ID NO: 778 - DNA, 20 bp, Artificial
  Synthetically generated peptide
gcccggagcccgtcacccaa

SEQ ID NO: 779 - DNA, 20 bp, Artificial
  Synthetically generated peptide
agcccggagcccgtcaccca

SEQ ID NO: 780 - DNA, 20 bp, Artificial
  Synthetically generated peptide
gagcccggagcccgtcaccc

SEQ ID NO: 781 - DNA, 20 bp, Artificial
  Synthetically generated peptide
ggagcccggagcccgtcacc

SEQ ID NO: 782 - DNA, 20 bp, Artificial
  Synthetically generated peptide
gggagcccggagcccgtcac

SEQ ID NO: 783 - DNA, 20 bp, Artificial
  Synthetically generated peptide
cgggagcccggagcccgtca

SEQ ID NO: 784 - DNA, 20 bp, Artificial
  Synthetically generated peptide
tcgggagcccggagcccgtc

SEQ ID NO: 785 - DNA, 20 bp, Artificial
  Synthetically generated peptide
ctcgggagcccggagcccgt

SEQ ID NO: 786 - DNA, 20 bp, Artificial
  Synthetically generated peptide
cctcgggagcccggagcccg

SEQ ID NO: 787 - DNA, 20 bp, Artificial
  Synthetically generated peptide
acctcgggagcccggagccc

SEQ ID NO: 788 - DNA, 20 bp, Artificial
  Synthetically generated peptide
cacctcgggagcccggagcc

SEQ ID NO: 789 - DNA, 20 bp, Artificial
  Synthetically generated peptide
tcacctcgggagcccggagc

SEQ ID NO: 790 - DNA, 20 bp, Artificial
  Synthetically generated peptide
ttcacctcgggagcccggag

SEQ ID NO: 791 - DNA, 20 bp, Artificial
  Synthetically generated peptide
cttcacctcgggagcccgga

SEQ ID NO: 792 - DNA, 20 bp, Artificial
  Synthetically generated peptide
tcttcacctcgggagcccgg

SEQ ID NO: 793 - DNA, 20 bp, Artificial
  Synthetically generated peptide
ctcttcacctcgggagcccg

SEQ ID NO: 794 - DNA, 20 bp, Artificial
  Synthetically generated peptide
gctcttcacctcgggagccc

SEQ ID NO: 795 - DNA, 20 bp, Artificial
  Synthetically generated peptide
tgctcttcacctcgggagcc

SEQ ID NO: 796 - DNA, 20 bp, Artificial
  Synthetically generated peptide
atgctcttcacctcgggagc

SEQ ID NO: 797 - DNA, 20 bp, Artificial
  Synthetically generated peptide
gatgctcttcacctcgggag

SEQ ID NO: 798 - DNA, 20 bp, Artificial
  Synthetically generated peptide
cgatgctcttcacctcggga

SEQ ID NO: 799 - DNA, 20 bp, Artificial
  Synthetically generated peptide
ccgatgctcttcacctcggg

SEQ ID NO: 800 - DNA, 20 bp, Artificial
  Synthetically generated peptide
cccgatgctcttcacctcgg

SEQ ID NO: 801 - DNA, 20 bp, Artificial
  Synthetically generated peptide
ccccgatgctcttcacctcg

SEQ ID NO: 802 - DNA, 20 bp, Artificial
  Synthetically generated peptide
cccccgatgctcttcacctc

SEQ ID NO: 803 - DNA, 20 bp, Artificial
  Synthetically generated peptide
gcccccgatgctcttcacct

SEQ ID NO: 804 - DNA, 20 bp, Artificial
  Synthetically generated peptide
agcccccgatgctcttcacc

SEQ ID NO: 805 - DNA, 20 bp, Artificial
  Synthetically generated peptide
cagcccccgatgctcttcac

SEQ ID NO: 806 - DNA, 20 bp, Artificial
  Synthetically generated peptide
tcagcccccgatgctcttca

SEQ ID NO: 807 - DNA, 20 bp, Artificial
  Synthetically generated peptide
ctcagcccccgatgctcttc

SEQ ID NO: 808 - DNA, 20 bp, Artificial
  Synthetically generated peptide
cctcagcccccgatgctctt

SEQ ID NO: 809 - DNA, 20 bp, Artificial
  Synthetically generated peptide
acctcagcccccgatgctct

SEQ ID NO: 810 - DNA, 20 bp, Artificial
  Synthetically generated peptide
cacctcagcccccgatgctc

SEQ ID NO: 811 - DNA, 20 bp, Artificial
  Synthetically generated peptide
ccacctcagcccccgatgct

SEQ ID NO: 812 - DNA, 20 bp, Artificial
  Synthetically generated peptide
cccacctcagcccccgatgc

SEQ ID NO: 813 - DNA, 20 bp, Artificial
  Synthetically generated peptide
tcccacctcagcccccgatg

SEQ ID NO: 814 - DNA, 20 bp, Artificial
  Synthetically generated peptide
gtcccacctcagcccccgat

SEQ ID NO: 815 - DNA, 20 bp, Artificial
  Synthetically generated peptide
ggtcccacctcagcccccga

SEQ ID NO: 816 - DNA, 20 bp, Artificial
  Synthetically generated peptide
aggtcccacctcagcccccg

SEQ ID NO: 817 - DNA, 25 bp, Artificial
  Synthetically generated peptide
gcccggcagcggcccccagaggccg

SEQ ID NO: 818 - DNA, 20 bp, Artificial
  Synthetically generated peptide
cccggcagcggcccccagag

SEQ ID NO: 819 - DNA, 20 bp, Artificial
  Synthetically generated peptide
ccggcagcggcccccagagg

SEQ ID NO: 820 - DNA, 20 bp, Artificial
  Synthetically generated peptide
cggcagcggcccccagaggc

SEQ ID NO: 821 - DNA, 20 bp, Artificial
  Synthetically generated peptide
ggcagcggcccccagaggcc

SEQ ID NO: 822 - DNA, 20 bp, Artificial
  Synthetically generated peptide
gcagcggcccccagaggccg

SEQ ID NO: 823 - DNA, 20 bp, Artificial
  Synthetically generated peptide
cagcggcccccagaggccgg

SEQ ID NO: 824 - DNA, 20 bp, Artificial
  Synthetically generated peptide
agcggcccccagaggccggg

SEQ ID NO: 825 - DNA, 20 bp, Artificial
  Synthetically generated peptide
gcggcccccagaggccgggc

SEQ ID NO: 826 - DNA, 20 bp, Artificial
  Synthetically generated peptide
cggcccccagaggccgggct

SEQ ID NO: 827 - DNA, 20 bp, Artificial
  Synthetically generated peptide
ggcccccagaggccgggctg

SEQ ID NO: 828 - DNA, 20 bp, Artificial
  Synthetically generated peptide
gcccccagaggccgggctgg

SEQ ID NO: 829 - DNA, 20 bp, Artificial
  Synthetically generated peptide
cccccagaggccgggctggg

SEQ ID NO: 830 - DNA, 20 bp, Artificial
  Synthetically generated peptide
ccccagaggccgggctggga

SEQ ID NO: 831 - DNA, 20 bp, Artificial
  Synthetically generated peptide
cccagaggccgggctgggaa

SEQ ID NO: 832 - DNA, 20 bp, Artificial
  Synthetically generated peptide
ggcccggcagcggcccccag

SEQ ID NO: 833 - DNA, 20 bp, Artificial
  Synthetically generated peptide
aggcccggcagcggccccca

SEQ ID NO: 834 - DNA, 20 bp, Artificial
  Synthetically generated peptide
caggcccggcagcggccccc

SEQ ID NO: 835 - DNA, 20 bp, Artificial
  Synthetically generated peptide
acaggcccggcagcggcccc

SEQ ID NO: 836 - DNA, 20 bp, Artificial
  Synthetically generated peptide
cacaggcccggcagcggccc

SEQ ID NO: 837 - DNA, 20 bp, Artificial
  Synthetically generated peptide
tcacaggcccggcagcggcc

SEQ ID NO: 838 - DNA, 20 bp, Artificial
  Synthetically generated peptide
ctcacaggcccggcagcggc

SEQ ID NO: 839 - DNA, 20 bp, Artificial
  Synthetically generated peptide
gctcacaggcccggcagcgg

SEQ ID NO: 840 - DNA, 20 bp, Artificial
  Synthetically generated peptide
ggctcacaggcccggcagcg

SEQ ID NO: 841 - DNA, 20 bp, Artificial
  Synthetically generated peptide
aggctcacaggcccggcagc

SEQ ID NO: 842 - DNA, 20 bp, Artificial
  Synthetically generated peptide
caggctcacaggcccggcag

SEQ ID NO: 843 - DNA, 20 bp, Artificial
  Synthetically generated peptide
acaggctcacaggcccggca

SEQ ID NO: 844 - DNA, 20 bp, Artificial
  Synthetically generated peptide
cacaggctcacaggcccggc

SEQ ID NO: 845 - DNA, 20 bp, Artificial
  Synthetically generated peptide
ccacaggctcacaggcccgg

SEQ ID NO: 846 - DNA, 20 bp, Artificial
  Synthetically generated peptide
tccacaggctcacaggcccg

SEQ ID NO: 847 - DNA, 30 bp, Artificial
  Synthetically generated peptide
cggtctaccgcggaggcactgtggcctcgg

SEQ ID NO: 848 - DNA, 20 bp, Artificial
  Synthetically generated peptide
ggtctaccgcggaggcactg

SEQ ID NO: 849 - DNA, 20 bp, Artificial
  Synthetically generated peptide
gtctaccgcggaggcactgt

SEQ ID NO: 850 - DNA, 20 bp, Artificial
  Synthetically generated peptide
tctaccgcggaggcactgtg

SEQ ID NO: 851 - DNA, 20 bp, Artificial
  Synthetically generated peptide
ctaccgcggaggcactgtgg

SEQ ID NO: 852 - DNA, 20 bp, Artificial
  Synthetically generated peptide
taccgcggaggcactgtggc

SEQ ID NO: 853 - DNA, 20 bp, Artificial
  Synthetically generated peptide
accgcggaggcactgtggcc

SEQ ID NO: 854 - DNA, 20 bp, Artificial
  Synthetically generated peptide
ccgcggaggcactgtggcct

SEQ ID NO: 855 - DNA, 20 bp, Artificial
  Synthetically generated peptide
cgcggaggcactgtggcctc

SEQ ID NO: 856 - DNA, 20 bp, Artificial
  Synthetically generated peptide
gcggaggcactgtggcctcg

SEQ ID NO: 857 - DNA, 20 bp, Artificial
  Synthetically generated peptide
cggaggcactgtggcctcgg

SEQ ID NO: 858 - DNA, 20 bp, Artificial
  Synthetically generated peptide
ggaggcactgtggcctcggg

SEQ ID NO: 859 - DNA, 20 bp, Artificial
  Synthetically generated peptide
gaggcactgtggcctcgggt

SEQ ID NO: 860 - DNA, 20 bp, Artificial
  Synthetically generated peptide
aggcactgtggcctcgggtc

SEQ ID NO: 861 - DNA, 20 bp, Artificial
  Synthetically generated peptide
ggcactgtggcctcgggtcg

SEQ ID NO: 862 - DNA, 20 bp, Artificial
  Synthetically generated peptide
gcactgtggcctcgggtcgg

SEQ ID NO: 863 - DNA, 20 bp, Artificial
  Synthetically generated peptide
cactgtggcctcgggtcggc

SEQ ID NO: 864 - DNA, 20 bp, Artificial
  Synthetically generated peptide
actgtggcctcgggtcggcc

SEQ ID NO: 865 - DNA, 20 bp, Artificial
  Synthetically generated peptide
ctgtggcctcgggtcggccc

SEQ ID NO: 866 - DNA, 20 bp, Artificial
  Synthetically generated peptide
tgtggcctcgggtcggcccc

SEQ ID NO: 867 - DNA, 20 bp, Artificial
  Synthetically generated peptide
gtggcctcgggtcggccccg

SEQ ID NO: 868 - DNA, 20 bp, Artificial
  Synthetically generated peptide
tggcctcgggtcggccccgg

SEQ ID NO: 869 - DNA, 20 bp, Artificial
  Synthetically generated peptide
ggcctcgggtcggccccgga

SEQ ID NO: 870 - DNA, 20 bp, Artificial
  Synthetically generated peptide
gcctcgggtcggccccggag

SEQ ID NO: 871 - DNA, 20 bp, Artificial
  Synthetically generated peptide
cctcgggtcggccccggagc

SEQ ID NO: 872 - DNA, 20 bp, Artificial
  Synthetically generated peptide
ctcgggtcggccccggagcg

SEQ ID NO: 873 - DNA, 20 bp, Artificial
  Synthetically generated peptide
tcgggtcggccccggagcga

SEQ ID NO: 874 - DNA, 20 bp, Artificial
  Synthetically generated peptide
cgggtcggccccggagcgag

SEQ ID NO: 875 - DNA, 20 bp, Artificial
  Synthetically generated peptide
gggtcggccccggagcgagg

SEQ ID NO: 876 - DNA, 20 bp, Artificial
  Synthetically generated peptide
ggtcggccccggagcgaggc

SEQ ID NO: 877 - DNA, 20 bp, Artificial
  Synthetically generated peptide
gtcggccccggagcgaggcc

SEQ ID NO: 878 - DNA, 20 bp, Artificial
  Synthetically generated peptide
tcggccccggagcgaggcct

SEQ ID NO: 879 - DNA, 20 bp, Artificial
  Synthetically generated peptide
cggccccggagcgaggcctc

SEQ ID NO: 880 - DNA, 20 bp, Artificial
  Synthetically generated peptide
ggccccggagcgaggcctcc

SEQ ID NO: 881 - DNA, 20 bp, Artificial
  Synthetically generated peptide
gccccggagcgaggcctcca

SEQ ID NO: 882 - DNA, 20 bp, Artificial
  Synthetically generated peptide
ccccggagcgaggcctccag

SEQ ID NO: 883 - DNA, 20 bp, Artificial
  Synthetically generated peptide
cccggagcgaggcctccaga

SEQ ID NO: 884 - DNA, 20 bp, Artificial
  Synthetically generated peptide
ccggagcgaggcctccagaa

SEQ ID NO: 885 - DNA, 20 bp, Artificial
  Synthetically generated peptide
cggagcgaggcctccagaac

SEQ ID NO: 886 - DNA, 20 bp, Artificial
  Synthetically generated peptide
ggagcgaggcctccagaact

SEQ ID NO: 887 - DNA, 20 bp, Artificial
  Synthetically generated peptide
gagcgaggcctccagaacta

SEQ ID NO: 888 - DNA, 20 bp, Artificial
  Synthetically generated peptide
agcgaggcctccagaactac

SEQ ID NO: 889 - DNA, 20 bp, Artificial
  Synthetically generated peptide
gcgaggcctccagaactacc

SEQ ID NO: 890 - DNA, 20 bp, Artificial
  Synthetically generated peptide
cgaggcctccagaactacca

SEQ ID NO: 891 - DNA, 20 bp, Artificial
  Synthetically generated peptide
ccggtctaccgcggaggcac

SEQ ID NO: 892 - DNA, 20 bp, Artificial
  Synthetically generated peptide
tccggtctaccgcggaggca

SEQ ID NO: 893 - DNA, 20 bp, Artificial
  Synthetically generated peptide
gtccggtctaccgcggaggc

SEQ ID NO: 894 - DNA, 20 bp, Artificial
  Synthetically generated peptide
agtccggtctaccgcggagg

SEQ ID NO: 895 - DNA, 20 bp, Artificial
  Synthetically generated peptide
aagtccggtctaccgcggag

SEQ ID NO: 896 - DNA, 20 bp, Artificial
  Synthetically generated peptide
caagtccggtctaccgcgga

SEQ ID NO: 897 - DNA, 20 bp, Artificial
  Synthetically generated peptide
ccaagtccggtctaccgcgg

SEQ ID NO: 898 - DNA, 20 bp, Artificial
  Synthetically generated peptide
cccaagtccggtctaccgcg

SEQ ID NO: 899 - DNA, 20 bp, Artificial
  Synthetically generated peptide
acccaagtccggtctaccgc

SEQ ID NO: 900 - DNA, 20 bp, Artificial
  Synthetically generated peptide
cacccaagtccggtctaccg

SEQ ID NO: 901 - DNA, 20 bp, Artificial
  Synthetically generated peptide
tcacccaagtccggtctacc

SEQ ID NO: 902 - DNA, 20 bp, Artificial
  Synthetically generated peptide
gtcacccaagtccggtctac

SEQ ID NO: 903 - DNA, 20 bp, Artificial
  Synthetically generated peptide
cgtcacccaagtccggtcta

SEQ ID NO: 904 - DNA, 20 bp, Artificial
  Synthetically generated peptide
ccgtcacccaagtccggtct

SEQ ID NO: 905 - DNA, 20 bp, Artificial
  Synthetically generated peptide
cccgtcacccaagtccggtc

SEQ ID NO: 906 - DNA, 20 bp, Artificial
  Synthetically generated peptide
gcccgtcacccaagtccggt

SEQ ID NO: 907 - DNA, 20 bp, Artificial
  Synthetically generated peptide
agcccgtcacccaagtccgg

SEQ ID NO: 908 - DNA, 20 bp, Artificial
  Synthetically generated peptide
gagcccgtcacccaagtccg

SEQ ID NO: 909 - DNA, 20 bp, Artificial
  Synthetically generated peptide
ggagcccgtcacccaagtcc

SEQ ID NO: 910 - DNA, 20 bp, Artificial
  Synthetically generated peptide
cggagcccgtcacccaagtc

SEQ ID NO: 911 - DNA, 20 bp, Artificial
  Synthetically generated peptide
ccggagcccgtcacccaagt

SEQ ID NO: 912 - DNA, 20 bp, Artificial
  Synthetically generated peptide
cccggagcccgtcacccaag

SEQ ID NO: 913 - DNA, 20 bp, Artificial
  Synthetically generated peptide
gcccggagcccgtcacccaa

SEQ ID NO: 914 - DNA, 20 bp, Artificial
  Synthetically generated peptide
agcccggagcccgtcaccca

SEQ ID NO: 915 - DNA, 20 bp, Artificial
  Synthetically generated peptide
gagcccggagcccgtcaccc

SEQ ID NO: 916 - DNA, 20 bp, Artificial
  Synthetically generated peptide
ggagcccggagcccgtcacc

SEQ ID NO: 917 - DNA, 20 bp, Artificial
  Synthetically generated peptide
gggagcccggagcccgtcac

SEQ ID NO: 918 - DNA, 20 bp, Artificial
  Synthetically generated peptide
cgggagcccggagcccgtca

SEQ ID NO: 919 - DNA, 20 bp, Artificial
  Synthetically generated peptide
tcgggagcccggagcccgtc

SEQ ID NO: 920 - DNA, 20 bp, Artificial
  Synthetically generated peptide
ctcgggagcccggagcccgt

SEQ ID NO: 921 - DNA, 20 bp, Artificial
  Synthetically generated peptide
cctcgggagcccggagcccg

SEQ ID NO: 922 - DNA, 20 bp, Artificial
  Synthetically generated peptide
acctcgggagcccggagccc

SEQ ID NO: 923 - DNA, 20 bp, Artificial
  Synthetically generated peptide
cacctcgggagcccggagcc

SEQ ID NO: 924 - DNA, 20 bp, Artificial
  Synthetically generated peptide
tcacctcgggagcccggagc

SEQ ID NO: 925 - DNA, 20 bp, Artificial
  Synthetically generated peptide
ttcacctcgggagcccggag

SEQ ID NO: 926 - DNA, 20 bp, Artificial
  Synthetically generated peptide
cttcacctcgggagcccgga

SEQ ID NO: 927 - DNA, 20 bp, Artificial
  Synthetically generated peptide
tcttcacctcgggagcccgg

SEQ ID NO: 928 - DNA, 20 bp, Artificial
  Synthetically generated peptide
ctcttcacctcgggagcccg

SEQ ID NO: 929 - DNA, 20 bp, Artificial
  Synthetically generated peptide
gctcttcacctcgggagccc

SEQ ID NO: 930 - DNA, 20 bp, Artificial
  Synthetically generated peptide
tgctcttcacctcgggagcc

SEQ ID NO: 931 - DNA, 20 bp, Artificial
  Synthetically generated peptide
atgctcttcacctcgggagc

SEQ ID NO: 932 - DNA, 20 bp, Artificial
  Synthetically generated peptide
gatgctcttcacctcgggag

SEQ ID NO: 933 - DNA, 20 bp, Artificial
  Synthetically generated peptide
cgatgctcttcacctcggga

SEQ ID NO: 934 - DNA, 20 bp, Artificial
  Synthetically generated peptide
ccgatgctcttcacctcggg

SEQ ID NO: 935 - DNA, 20 bp, Artificial
  Synthetically generated peptide
cccgatgctcttcacctcgg

SEQ ID NO: 936 - DNA, 20 bp, Artificial
  Synthetically generated peptide
ccccgatgctcttcacctcg

SEQ ID NO: 937 - DNA, 20 bp, Artificial
  Synthetically generated peptide
cccccgatgctcttcacctc

SEQ ID NO: 938 - DNA, 20 bp, Artificial
  Synthetically generated peptide
gcccccgatgctcttcacct

SEQ ID NO: 939 - DNA, 20 bp, Artificial
  Synthetically generated peptide
agcccccgatgctcttcacc

SEQ ID NO: 940 - DNA, 20 bp, Artificial
  Synthetically generated peptide
cagcccccgatgctcttcac

SEQ ID NO: 941 - DNA, 20 bp, Artificial
  Synthetically generated peptide
tcagcccccgatgctcttca

SEQ ID NO: 942 - DNA, 20 bp, Artificial
  Synthetically generated peptide
ctcagcccccgatgctcttc

SEQ ID NO: 943 - DNA, 20 bp, Artificial
  Synthetically generated peptide
cctcagcccccgatgctctt

SEQ ID NO: 944 - DNA, 20 bp, Artificial
  Synthetically generated peptide
acctcagcccccgatgctct

SEQ ID NO: 945 - DNA, 20 bp, Artificial
  Synthetically generated peptide
cacctcagcccccgatgctc

SEQ ID NO: 946 - DNA, 20 bp, Artificial
  Synthetically generated peptide
ccacctcagcccccgatgct

SEQ ID NO: 947 - DNA, 20 bp, Artificial
  Synthetically generated peptide
cccacctcagcccccgatgc

SEQ ID NO: 948 - DNA, 20 bp, Artificial
  Synthetically generated peptide
tcccacctcagcccccgatg

SEQ ID NO: 949 - DNA, 20 bp, Artificial
  Synthetically generated peptide
gtcccacctcagcccccgat

SEQ ID NO: 950 - DNA, 20 bp, Artificial
  Synthetically generated peptide
ggtcccacctcagcccccga

SEQ ID NO: 951 - DNA, 20 bp, Artificial
  Synthetically generated peptide
aggtcccacctcagcccccg

SEQ ID NO: 952 - DNA, 32 bp, Artificial
  Synthetically generated peptide
acaaaaactagccgggcgtggtggggcacgcc

SEQ ID NO: 953 - DNA, 20 bp, Artificial
  Synthetically generated peptide
caaaaactagccgggcgtgg

SEQ ID NO: 954 - DNA, 20 bp, Artificial
  Synthetically generated peptide
aaaaactagccgggcgtggt

SEQ ID NO: 955 - DNA, 20 bp, Artificial
  Synthetically generated peptide
aaaactagccgggcgtggtg

SEQ ID NO: 956 - DNA, 20 bp, Artificial
  Synthetically generated peptide
aaactagccgggcgtggtgg

SEQ ID NO: 957 - DNA, 20 bp, Artificial
  Synthetically generated peptide
aactagccgggcgtggtggg

SEQ ID NO: 958 - DNA, 20 bp, Artificial
  Synthetically generated peptide
actagccgggcgtggtgggg

SEQ ID NO: 959 - DNA, 20 bp, Artificial
  Synthetically generated peptide
ctagccgggcgtggtggggc

SEQ ID NO: 960 - DNA, 20 bp, Artificial
  Synthetically generated peptide
tagccgggcgtggtggggca

SEQ ID NO: 961 - DNA, 20 bp, Artificial
  Synthetically generated peptide
agccgggcgtggtggggcac

SEQ ID NO: 962 - DNA, 20 bp, Artificial
  Synthetically generated peptide
gccgggcgtggtggggcacg

SEQ ID NO: 963 - DNA, 20 bp, Artificial
  Synthetically generated peptide
ccgggcgtggtggggcacgc

SEQ ID NO: 964 - DNA, 20 bp, Artificial
  Synthetically generated peptide
cgggcgtggtggggcacgcc

SEQ ID NO: 965 - DNA, 20 bp, Artificial
  Synthetically generated peptide
gggcgtggtggggcacgcct

SEQ ID NO: 966 - DNA, 20 bp, Artificial
  Synthetically generated peptide
ggcgtggtggggcacgccta

SEQ ID NO: 967 - DNA, 20 bp, Artificial
  Synthetically generated peptide
gcgtggtggggcacgcctat

SEQ ID NO: 968 - DNA, 20 bp, Artificial
  Synthetically generated peptide
cgtggtggggcacgcctata

SEQ ID NO: 969 - DNA, 20 bp, Artificial
  Synthetically generated peptide
gtggtggggcacgcctataa

SEQ ID NO: 970 - DNA, 20 bp, Artificial
  Synthetically generated peptide
tggtggggcacgcctataat

SEQ ID NO: 971 - DNA, 20 bp, Artificial
  Synthetically generated peptide
ggtggggcacgcctataatc

SEQ ID NO: 972 - DNA, 20 bp, Artificial
  Synthetically generated peptide
gtggggcacgcctataatcc

SEQ ID NO: 973 - DNA, 20 bp, Artificial
  Synthetically generated peptide
tggggcacgcctataatccc

SEQ ID NO: 974 - DNA, 20 bp, Artificial
  Synthetically generated peptide
ggggcacgcctataatccca

SEQ ID NO: 975 - DNA, 20 bp, Artificial
  Synthetically generated peptide
gggcacgcctataatcccag

SEQ ID NO: 976 - DNA, 20 bp, Artificial
  Synthetically generated peptide
ggcacgcctataatcccagc

SEQ ID NO: 977 - DNA, 20 bp, Artificial
  Synthetically generated peptide
gcacgcctataatcccagct

SEQ ID NO: 978 - DNA, 20 bp, Artificial
  Synthetically generated peptide
cacgcctataatcccagctt

SEQ ID NO: 979 - DNA, 20 bp, Artificial
  Synthetically generated peptide
acgcctataatcccagctta

SEQ ID NO: 980 - DNA, 20 bp, Artificial
  Synthetically generated peptide
cgcctataatcccagcttaa

SEQ ID NO: 981 - DNA, 20 bp, Artificial
  Synthetically generated peptide
tacaaaaactagccgggcgt

SEQ ID NO: 982 - DNA, 20 bp, Artificial
  Synthetically generated peptide
atacaaaaactagccgggcg

SEQ ID NO: 983 - DNA, 20 bp, Artificial
  Synthetically generated peptide
aatacaaaaactagccgggc

SEQ ID NO: 984 - DNA, 22 bp, Artificial
  Synthetically generated peptide
ggccgaggcacgccgtcatgca

SEQ ID NO: 985 - DNA, 27 bp, Artificial
  Synthetically generated peptide
ccggcccttggcaccacgtggtggcga

SEQ ID NO: 986 - DNA, 23 bp, Artificial
  Synthetically generated peptide
ttgttccctcggctgcgacgtcg

SEQ ID NO: 987 - DNA, 24 bp, Artificial
  Synthetically generated peptide
cagtctgcgccgccgcagctccgg

SEQ ID NO: 988 - DNA, 22 bp, Artificial
  Synthetically generated peptide
cagtgcgtgtgcggtacagccg

SEQ ID NO: 989 - DNA, 26 bp, Artificial
  Synthetically generated peptide
tgtgctggctgttccgacagttcggt

SEQ ID NO: 990 - DNA, 23 bp, Artificial
  Synthetically generated peptide
taactacgctatcccgtgcggcc

SEQ ID NO: 991 - DNA, 26 bp, Artificial
  Synthetically generated peptide
tcgcccagccccagcctggccgaggc

SEQ ID NO: 992 - DNA, 23 bp, Artificial
  Synthetically generated peptide
caggccggcgcgcgctcccgcaa

SEQ ID NO: 993 - DNA, 20 bp, Artificial
  Synthetically generated peptide
aggccggcgcgcgctcccgc

SEQ ID NO: 994 - DNA, 20 bp, Artificial
  Synthetically generated peptide
ggccggcgcgcgctcccgca

SEQ ID NO: 995 - DNA, 20 bp, Artificial
  Synthetically generated peptide
gccggcgcgcgctcccgcaa

SEQ ID NO: 996 - DNA, 20 bp, Artificial
  Synthetically generated peptide
ccggcgcgcgctcccgcaag

SEQ ID NO: 997 - DNA, 20 bp, Artificial
  Synthetically generated peptide
cggcgcgcgctcccgcaagc

SEQ ID NO: 998 - DNA, 20 bp, Artificial
  Synthetically generated peptide
ggcgcgcgctcccgcaagcc

SEQ ID NO: 999 - DNA, 20 bp, Artificial
  Synthetically generated peptide
gcgcgcgctcccgcaagccc

SEQ ID NO: 1000 - DNA, 20 bp, Artificial
  Synthetically generated peptide
cgcgcgctcccgcaagcccg

SEQ ID NO: 1001 - DNA, 20 bp, Artificial
  Synthetically generated peptide
gcgcgctcccgcaagcccgc

SEQ ID NO: 1002 - DNA, 20 bp, Artificial
  Synthetically generated peptide
cgcgctcccgcaagcccgcc

SEQ ID NO: 1003 - DNA, 20 bp, Artificial
  Synthetically generated peptide
gcgctcccgcaagcccgcct

SEQ ID NO: 1004 - DNA, 20 bp, Artificial
  Synthetically generated peptide
cgctcccgcaagcccgcctc

SEQ ID NO: 1005 - DNA, 20 bp, Artificial
  Synthetically generated peptide
gctcccgcaagcccgcctca

SEQ ID NO: 1006 - DNA, 20 bp, Artificial
  Synthetically generated peptide
ctcccgcaagcccgcctcac

SEQ ID NO: 1007 - DNA, 20 bp, Artificial
  Synthetically generated peptide
tcccgcaagcccgcctcacc

SEQ ID NO: 1008 - DNA, 20 bp, Artificial
  Synthetically generated peptide
cccgcaagcccgcctcacct

SEQ ID NO: 1009 - DNA, 20 bp, Artificial
  Synthetically generated peptide
ccgcaagcccgcctcacctg

SEQ ID NO: 1010 - DNA, 20 bp, Artificial
  Synthetically generated peptide
cgcaagcccgcctcacctga

SEQ ID NO: 1011 - DNA, 20 bp, Artificial
  Synthetically generated peptide
gcaagcccgcctcacctgag

SEQ ID NO: 1012 - DNA, 20 bp, Artificial
  Synthetically generated peptide
caagcccgcctcacctgagg

SEQ ID NO: 1013 - DNA, 20 bp, Artificial
  Synthetically generated peptide
aagcccgcctcacctgaggt

SEQ ID NO: 1014 - DNA, 20 bp, Artificial
  Synthetically generated peptide
agcccgcctcacctgaggtg

SEQ ID NO: 1015 - DNA, 20 bp, Artificial
  Synthetically generated peptide
gcccgcctcacctgaggtgg

SEQ ID NO: 1016 - DNA, 20 bp, Artificial
  Synthetically generated peptide
cccgcctcacctgaggtgga

SEQ ID NO: 1017 - DNA, 20 bp, Artificial
  Synthetically generated peptide
ccgcctcacctgaggtggag

SEQ ID NO: 1018 - DNA, 20 bp, Artificial
  Synthetically generated peptide
cgcctcacctgaggtggagg

SEQ ID NO: 1019 - DNA, 20 bp, Artificial
  Synthetically generated peptide
ccaggccggcgcgcgctccc

SEQ ID NO: 1020 - DNA, 20 bp, Artificial
  Synthetically generated peptide
cccaggccggcgcgcgctcc

SEQ ID NO: 1021 - DNA, 20 bp, Artificial
  Synthetically generated peptide
gcccaggccggcgcgcgctc

SEQ ID NO: 1022 - DNA, 20 bp, Artificial
  Synthetically generated peptide
tgcccaggccggcgcgcgct

SEQ ID NO: 1023 - DNA, 20 bp, Artificial
  Synthetically generated peptide
ctgcccaggccggcgcgcgc

SEQ ID NO: 1024 - DNA, 20 bp, Artificial
  Synthetically generated peptide
cctgcccaggccggcgcgcg

SEQ ID NO: 1025 - DNA, 20 bp, Artificial
  Synthetically generated peptide
gcctgcccaggccggcgcgc

SEQ ID NO: 1026 - DNA, 20 bp, Artificial
  Synthetically generated peptide
cgcctgcccaggccggcgcg

SEQ ID NO: 1027 - DNA, 20 bp, Artificial
  Synthetically generated peptide
tcgcctgcccaggccggcgc

SEQ ID NO: 1028 - DNA, 20 bp, Artificial
  Synthetically generated peptide
ctcgcctgcccaggccggcg

SEQ ID NO: 1029 - DNA, 20 bp, Artificial
  Synthetically generated peptide
gctcgcctgcccaggccggc

SEQ ID NO: 1030 - DNA, 20 bp, Artificial
  Synthetically generated peptide
cgctcgcctgcccaggccgg

SEQ ID NO: 1031 - DNA, 20 bp, Artificial
  Synthetically generated peptide
ccgctcgcctgcccaggccg

SEQ ID NO: 1032 - DNA, 20 bp, Artificial
  Synthetically generated peptide
cccgctcgcctgcccaggcc

SEQ ID NO: 1033 - DNA, 20 bp, Artificial
  Synthetically generated peptide
gcccgctcgcctgcccaggc

SEQ ID NO: 1034 - DNA, 20 bp, Artificial
  Synthetically generated peptide
cgcccgctcgcctgcccagg

SEQ ID NO: 1035 - DNA, 20 bp, Artificial
  Synthetically generated peptide
gcgcccgctcgcctgcccag

SEQ ID NO: 1036 - DNA, 20 bp, Artificial
  Synthetically generated peptide
cgcgcccgctcgcctgccca

SEQ ID NO: 1037 - DNA, 20 bp, Artificial
  Synthetically generated peptide
gcgcgcccgctcgcctgccc

SEQ ID NO: 1038 - DNA, 20 bp, Artificial
  Synthetically generated peptide
agcgcgcccgctcgcctgcc

SEQ ID NO: 1039 - DNA, 20 bp, Artificial
  Synthetically generated peptide
gagcgcgcccgctcgcctgc

SEQ ID NO: 1040 - DNA, 20 bp, Artificial
  Synthetically generated peptide
ggagcgcgcccgctcgcctg

SEQ ID NO: 1041 - DNA, 20 bp, Artificial
  Synthetically generated peptide
gggagcgcgcccgctcgcct

SEQ ID NO: 1042 - DNA, 20 bp, Artificial
  Synthetically generated peptide
cgggagcgcgcccgctcgcc

SEQ ID NO: 1043 - DNA, 20 bp, Artificial
  Synthetically generated peptide
gcgggagcgcgcccgctcgc

SEQ ID NO: 1044 - DNA, 20 bp, Artificial
  Synthetically generated peptide
ggcgggagcgcgcccgctcg

SEQ ID NO: 1045 - DNA, 20 bp, Artificial
  Synthetically generated peptide
gggcgggagcgcgcccgctc

SEQ ID NO: 1046 - DNA, 20 bp, Artificial
  Synthetically generated peptide
ggggcgggagcgcgcccgct

SEQ ID NO: 1047 - DNA, 20 bp, Artificial
  Synthetically generated peptide
gggggcgggagcgcgcccgc

SEQ ID NO: 1048 - DNA, 24 bp, Artificial
  Synthetically generated peptide
ggacgggctgcgacgctcacgtgc

SEQ ID NO: 1049 - DNA, 20 bp, Artificial
  Synthetically generated peptide
gacgggctgcgacgctcacg

SEQ ID NO: 1050 - DNA, 20 bp, Artificial
  Synthetically generated peptide
acgggctgcgacgctcacgt

SEQ ID NO: 1051 - DNA, 20 bp, Artificial
  Synthetically generated peptide
cgggctgcgacgctcacgtg

SEQ ID NO: 1052 - DNA, 20 bp, Artificial
  Synthetically generated peptide
gggctgcgacgctcacgtgc

SEQ ID NO: 1053 - DNA, 20 bp, Artificial
  Synthetically generated peptide
ggctgcgacgctcacgtgct

SEQ ID NO: 1054 - DNA, 20 bp, Artificial
  Synthetically generated peptide
gctgcgacgctcacgtgctc

SEQ ID NO: 1055 - DNA, 20 bp, Artificial
  Synthetically generated peptide
ctgcgacgctcacgtgctcg

SEQ ID NO: 1056 - DNA, 20 bp, Artificial
  Synthetically generated peptide
tgcgacgctcacgtgctcgt

SEQ ID NO: 1057 - DNA, 20 bp, Artificial
  Synthetically generated peptide
gcgacgctcacgtgctcgtc

SEQ ID NO: 1058 - DNA, 20 bp, Artificial
  Synthetically generated peptide
cgacgctcacgtgctcgtct

SEQ ID NO: 1059 - DNA, 20 bp, Artificial
  Synthetically generated peptide
gacgctcacgtgctcgtctg

SEQ ID NO: 1060 - DNA, 20 bp, Artificial
  Synthetically generated peptide
acgctcacgtgctcgtctgt

SEQ ID NO: 1061 - DNA, 20 bp, Artificial
  Synthetically generated peptide
cgctcacgtgctcgtctgtg

SEQ ID NO: 1062 - DNA, 20 bp, Artificial
  Synthetically generated peptide
gctcacgtgctcgtctgtgt

SEQ ID NO: 1063 - DNA, 20 bp, Artificial
  Synthetically generated peptide
ctcacgtgctcgtctgtgtt

SEQ ID NO: 1064 - DNA, 20 bp, Artificial
  Synthetically generated peptide
tcacgtgctcgtctgtgttt

SEQ ID NO: 1065 - DNA, 20 bp, Artificial
  Synthetically generated peptide
cacgtgctcgtctgtgttta

SEQ ID NO: 1066 - DNA, 20 bp, Artificial
  Synthetically generated peptide
acgtgctcgtctgtgtttag

SEQ ID NO: 1067 - DNA, 20 bp, Artificial
  Synthetically generated peptide
cgtgctcgtctgtgtttagc

SEQ ID NO: 1068 - DNA, 20 bp, Artificial
  Synthetically generated peptide
gtgctcgtctgtgtttagcg

SEQ ID NO: 1069 - DNA, 20 bp, Artificial
  Synthetically generated peptide
tgctcgtctgtgtttagcgg

SEQ ID NO: 1070 - DNA, 20 bp, Artificial
  Synthetically generated peptide
gctcgtctgtgtttagcggc

SEQ ID NO: 1071 - DNA, 20 bp, Artificial
  Synthetically generated peptide
ctcgtctgtgtttagcggcg

SEQ ID NO: 1072 - DNA, 20 bp, Artificial
  Synthetically generated peptide
tcgtctgtgtttagcggcgg

SEQ ID NO: 1073 - DNA, 20 bp, Artificial
  Synthetically generated peptide
cgtctgtgtttagcggcgga

SEQ ID NO: 1074 - DNA, 20 bp, Artificial
  Synthetically generated peptide
gtctgtgtttagcggcggag

SEQ ID NO: 1075 - DNA, 20 bp, Artificial
  Synthetically generated peptide
tctgtgtttagcggcggagg

SEQ ID NO: 1076 - DNA, 20 bp, Artificial
  Synthetically generated peptide
ctgtgtttagcggcggagga

SEQ ID NO: 1077 - DNA, 20 bp, Artificial
  Synthetically generated peptide
tgtgtttagcggcggaggaa

SEQ ID NO: 1078 - DNA, 20 bp, Artificial
  Synthetically generated peptide
gggacgggctgcgacgctca

SEQ ID NO: 1079 - DNA, 20 bp, Artificial
  Synthetically generated peptide
tgggacgggctgcgacgctc

SEQ ID NO: 1080 - DNA, 20 bp, Artificial
  Synthetically generated peptide
ctgggacgggctgcgacgct

SEQ ID NO: 1081 - DNA, 20 bp, Artificial
  Synthetically generated peptide
gctgggacgggctgcgacgc

SEQ ID NO: 1082 - DNA, 20 bp, Artificial
  Synthetically generated peptide
agctgggacgggctgcgacg

SEQ ID NO: 1083 - DNA, 20 bp, Artificial
  Synthetically generated peptide
cagctgggacgggctgcgac

SEQ ID NO: 1084 - DNA, 20 bp, Artificial
  Synthetically generated peptide
acagctgggacgggctgcga

SEQ ID NO: 1085 - DNA, 20 bp, Artificial
  Synthetically generated peptide
cacagctgggacgggctgcg

SEQ ID NO: 1086 - DNA, 20 bp, Artificial
  Synthetically generated peptide
gcacagctgggacgggctgc

SEQ ID NO: 1087 - DNA, 20 bp, Artificial
  Synthetically generated peptide
ggcacagctgggacgggctg

SEQ ID NO: 1088 - DNA, 20 bp, Artificial
  Synthetically generated peptide
aggcacagctgggacgggct

SEQ ID NO: 1089 - DNA, 31 bp, Artificial
  Synthetically generated peptide
gaggtgggggtgcgaggcgggaaacccctcg

SEQ ID NO: 1090 - DNA, 24 bp, Artificial
  Synthetically generated peptide
caatcgccggggtccgggcccggc

SEQ ID NO: 1091 - DNA, 20 bp, Artificial
  Synthetically generated peptide
aatcgccggggtccgggccc

SEQ ID NO: 1092 - DNA, 20 bp, Artificial
  Synthetically generated peptide
atcgccggggtccgggcccg

SEQ ID NO: 1093 - DNA, 20 bp, Artificial
  Synthetically generated peptide
tcgccggggtccgggcccgg

SEQ ID NO: 1094 - DNA, 20 bp, Artificial
  Synthetically generated peptide
cgccggggtccgggcccggc

SEQ ID NO: 1095 - DNA, 20 bp, Artificial
  Synthetically generated peptide
gccggggtccgggcccggct

SEQ ID NO: 1096 - DNA, 20 bp, Artificial
  Synthetically generated peptide
ccggggtccgggcccggctc

SEQ ID NO: 1097 - DNA, 20 bp, Artificial
  Synthetically generated peptide
cggggtccgggcccggctcc

SEQ ID NO: 1098 - DNA, 20 bp, Artificial
  Synthetically generated peptide
ggggtccgggcccggctccg

SEQ ID NO: 1099 - DNA, 20 bp, Artificial
  Synthetically generated peptide
gggtccgggcccggctccga

SEQ ID NO: 1100 - DNA, 20 bp, Artificial
  Synthetically generated peptide
ggtccgggcccggctccgag

SEQ ID NO: 1101 - DNA, 20 bp, Artificial
  Synthetically generated peptide
gtccgggcccggctccgagc

SEQ ID NO: 1102 - DNA, 20 bp, Artificial
  Synthetically generated peptide
tccgggcccggctccgagcc

SEQ ID NO: 1103 - DNA, 20 bp, Artificial
  Synthetically generated peptide
ccgggcccggctccgagcct

SEQ ID NO: 1104 - DNA, 20 bp, Artificial
  Synthetically generated peptide
cgggcccggctccgagcctc

SEQ ID NO: 1105 - DNA, 20 bp, Artificial
  Synthetically generated peptide
gggcccggctccgagcctct

SEQ ID NO: 1106 - DNA, 20 bp, Artificial
  Synthetically generated peptide
ggcccggctccgagcctctc

SEQ ID NO: 1107 - DNA, 20 bp, Artificial
  Synthetically generated peptide
gcccggctccgagcctctcc

SEQ ID NO: 1108 - DNA, 20 bp, Artificial
  Synthetically generated peptide
cccggctccgagcctctcct

SEQ ID NO: 1109 - DNA, 20 bp, Artificial
  Synthetically generated peptide
ccggctccgagcctctcctc

SEQ ID NO: 1110 - DNA, 20 bp, Artificial
  Synthetically generated peptide
cggctccgagcctctcctca

SEQ ID NO: 1111 - DNA, 20 bp, Artificial
  Synthetically generated peptide
ggctccgagcctctcctcag

SEQ ID NO: 1112 - DNA, 20 bp, Artificial
  Synthetically generated peptide
gctccgagcctctcctcagg

SEQ ID NO: 1113 - DNA, 20 bp, Artificial
  Synthetically generated peptide
ctccgagcctctcctcaggt

SEQ ID NO: 1114 - DNA, 20 bp, Artificial
  Synthetically generated peptide
tccgagcctctcctcaggtg

SEQ ID NO: 1115 - DNA, 20 bp, Artificial
  Synthetically generated peptide
ccgagcctctcctcaggtgg

SEQ ID NO: 1116 - DNA, 20 bp, Artificial
  Synthetically generated peptide
cgagcctctcctcaggtggc

SEQ ID NO: 1117 - DNA, 20 bp, Artificial
  Synthetically generated peptide
gcaatcgccggggtccgggc

SEQ ID NO: 1118 - DNA, 20 bp, Artificial
  Synthetically generated peptide
ggcaatcgccggggtccggg

SEQ ID NO: 1119 - DNA, 20 bp, Artificial
  Synthetically generated peptide
cggcaatcgccggggtccgg

SEQ ID NO: 1120 - DNA, 20 bp, Artificial
  Synthetically generated peptide
gcggcaatcgccggggtccg

SEQ ID NO: 1121 - DNA, 20 bp, Artificial
  Synthetically generated peptide
ggcggcaatcgccggggtcc

SEQ ID NO: 1122 - DNA, 20 bp, Artificial
  Synthetically generated peptide
gggcggcaatcgccggggtc

SEQ ID NO: 1123 - DNA, 20 bp, Artificial
  Synthetically generated peptide
cgggcggcaatcgccggggt

SEQ ID NO: 1124 - DNA, 20 bp, Artificial
  Synthetically generated peptide
gcgggcggcaatcgccgggg

SEQ ID NO: 1125 - DNA, 20 bp, Artificial
  Synthetically generated peptide
agcgggcggcaatcgccggg

SEQ ID NO: 1126 - DNA, 20 bp, Artificial
  Synthetically generated peptide
aagcgggcggcaatcgccgg

SEQ ID NO: 1127 - DNA, 20 bp, Artificial
  Synthetically generated peptide
gaagcgggcggcaatcgccg

SEQ ID NO: 1128 - DNA, 20 bp, Artificial
  Synthetically generated peptide
agaagcgggcggcaatcgcc

SEQ ID NO: 1129 - DNA, 21 bp, Artificial
  Synthetically generated peptide
tggccgaagcgacgaagaggg

SEQ ID NO: 1130 - DNA, 23 bp, Artificial
  Synthetically generated peptide
gggcggaggcgcgctcgggcgcg

SEQ ID NO: 1131 - DNA, 20 bp, Artificial
  Synthetically generated peptide
ggcggaggcgcgctcgggcg

SEQ ID NO: 1132 - DNA, 20 bp, Artificial
  Synthetically generated peptide
gcggaggcgcgctcgggcgc

SEQ ID NO: 1133 - DNA, 20 bp, Artificial
  Synthetically generated peptide
cggaggcgcgctcgggcgcg

SEQ ID NO: 1134 - DNA, 20 bp, Artificial
  Synthetically generated peptide
ggaggcgcgctcgggcgcgc

SEQ ID NO: 1135 - DNA, 20 bp, Artificial
  Synthetically generated peptide
gaggcgcgctcgggcgcgcg

SEQ ID NO: 1136 - DNA, 20 bp, Artificial
  Synthetically generated peptide
aggcgcgctcgggcgcgcgg

SEQ ID NO: 1137 - DNA, 20 bp, Artificial
  Synthetically generated peptide
ggcgcgctcgggcgcgcggg

SEQ ID NO: 1138 - DNA, 20 bp, Artificial
  Synthetically generated peptide
gcgcgctcgggcgcgcgggg

SEQ ID NO: 1139 - DNA, 20 bp, Artificial
  Synthetically generated peptide
cgcgctcgggcgcgcgggga

SEQ ID NO: 1140 - DNA, 20 bp, Artificial
  Synthetically generated peptide
gcgctcgggcgcgcggggag

SEQ ID NO: 1141 - DNA, 20 bp, Artificial
  Synthetically generated peptide
cgctcgggcgcgcggggagg

SEQ ID NO: 1142 - DNA, 25 bp, Artificial
  Synthetically generated peptide
cacggcgggcggcccccaggctcgc

SEQ ID NO: 1143 - DNA, 20 bp, Artificial
  Synthetically generated peptide
acggcgggcggcccccaggc

SEQ ID NO: 1144 - DNA, 20 bp, Artificial
  Synthetically generated peptide
cggcgggcggcccccaggct

SEQ ID NO: 1145 - DNA, 20 bp, Artificial
  Synthetically generated peptide
ggcgggcggcccccaggctc

SEQ ID NO: 1146 - DNA, 20 bp, Artificial
  Synthetically generated peptide
gcgggcggcccccaggctcg

SEQ ID NO: 1147 - DNA, 20 bp, Artificial
  Synthetically generated peptide
cgggcggcccccaggctcgc

SEQ ID NO: 1148 - DNA, 20 bp, Artificial
  Synthetically generated peptide
gggcggcccccaggctcgct

SEQ ID NO: 1149 - DNA, 20 bp, Artificial
  Synthetically generated peptide
ggcggcccccaggctcgctc

SEQ ID NO: 1150 - DNA, 20 bp, Artificial
  Synthetically generated peptide
gcggcccccaggctcgctcc

SEQ ID NO: 1151 - DNA, 20 bp, Artificial
  Synthetically generated peptide
cggcccccaggctcgctccg

SEQ ID NO: 1152 - DNA, 20 bp, Artificial
  Synthetically generated peptide
ggcccccaggctcgctccgg

SEQ ID NO: 1153 - DNA, 20 bp, Artificial
  Synthetically generated peptide
gcccccaggctcgctccggc

SEQ ID NO: 1154 - DNA, 20 bp, Artificial
  Synthetically generated peptide
cccccaggctcgctccggcc

SEQ ID NO: 1155 - DNA, 20 bp, Artificial
  Synthetically generated peptide
ccccaggctcgctccggcct

SEQ ID NO: 1156 - DNA, 20 bp, Artificial
  Synthetically generated peptide
cccaggctcgctccggccta

SEQ ID NO: 1157 - DNA, 20 bp, Artificial
  Synthetically generated peptide
ccaggctcgctccggcctaa

SEQ ID NO: 1158 - DNA, 20 bp, Artificial
  Synthetically generated peptide
caggctcgctccggcctaag

SEQ ID NO: 1159 - DNA, 20 bp, Artificial
  Synthetically generated peptide
aggctcgctccggcctaagc

SEQ ID NO: 1160 - DNA, 20 bp, Artificial
  Synthetically generated peptide
ggctcgctccggcctaagcg

SEQ ID NO: 1161 - DNA, 20 bp, Artificial
  Synthetically generated peptide
gctcgctccggcctaagcgc

SEQ ID NO: 1162 - DNA, 20 bp, Artificial
  Synthetically generated peptide
ctcgctccggcctaagcgct

SEQ ID NO: 1163 - DNA, 20 bp, Artificial
  Synthetically generated peptide
tcgctccggcctaagcgctg

SEQ ID NO: 1164 - DNA, 20 bp, Artificial
  Synthetically generated peptide
cgctccggcctaagcgctgg

SEQ ID NO: 1165 - DNA, 20 bp, Artificial
  Synthetically generated peptide
gctccggcctaagcgctggc

SEQ ID NO: 1166 - DNA, 20 bp, Artificial
  Synthetically generated peptide
ctccggcctaagcgctggct

SEQ ID NO: 1167 - DNA, 20 bp, Artificial
  Synthetically generated peptide
tccggcctaagcgctggctc

SEQ ID NO: 1168 - DNA, 20 bp, Artificial
  Synthetically generated peptide
ccggcctaagcgctggctcc

SEQ ID NO: 1169 - DNA, 20 bp, Artificial
  Synthetically generated peptide
cggcctaagcgctggctccc

SEQ ID NO: 1170 - DNA, 20 bp, Artificial
  Synthetically generated peptide
ggcctaagcgctggctccct

SEQ ID NO: 1171 - DNA, 20 bp, Artificial
  Synthetically generated peptide
gcctaagcgctggctccctc

SEQ ID NO: 1172 - DNA, 20 bp, Artificial
  Synthetically generated peptide
cctaagcgctggctccctcc

SEQ ID NO: 1173 - DNA, 20 bp, Artificial
  Synthetically generated peptide
ctaagcgctggctccctcca

SEQ ID NO: 1174 - DNA, 20 bp, Artificial
  Synthetically generated peptide
taagcgctggctccctccac

SEQ ID NO: 1175 - DNA, 20 bp, Artificial
  Synthetically generated peptide
aagcgctggctccctccaca

SEQ ID NO: 1176 - DNA, 20 bp, Artificial
  Synthetically generated peptide
agcgctggctccctccacac

SEQ ID NO: 1177 - DNA, 20 bp, Artificial
  Synthetically generated peptide
gcgctggctccctccacacg

SEQ ID NO: 1178 - DNA, 20 bp, Artificial
  Synthetically generated peptide
cgctggctccctccacacgc

SEQ ID NO: 1179 - DNA, 20 bp, Artificial
  Synthetically generated peptide
gctggctccctccacacgcg

SEQ ID NO: 1180 - DNA, 20 bp, Artificial
  Synthetically generated peptide
ctggctccctccacacgcgg

SEQ ID NO: 1181 - DNA, 20 bp, Artificial
  Synthetically generated peptide
tggctccctccacacgcgga

SEQ ID NO: 1182 - DNA, 20 bp, Artificial
  Synthetically generated peptide
ggctccctccacacgcggag

SEQ ID NO: 1183 - DNA, 20 bp, Artificial
  Synthetically generated peptide
gctccctccacacgcggaga

SEQ ID NO: 1184 - DNA, 20 bp, Artificial
  Synthetically generated peptide
ctccctccacacgcggagaa

SEQ ID NO: 1185 - DNA, 20 bp, Artificial
  Synthetically generated peptide
tccctccacacgcggagaag

SEQ ID NO: 1186 - DNA, 20 bp, Artificial
  Synthetically generated peptide
ccctccacacgcggagaaga

SEQ ID NO: 1187 - DNA, 20 bp, Artificial
  Synthetically generated peptide
cctccacacgcggagaagag

SEQ ID NO: 1188 - DNA, 20 bp, Artificial
  Synthetically generated peptide
ctccacacgcggagaagaga

SEQ ID NO: 1189 - DNA, 20 bp, Artificial
  Synthetically generated peptide
tcacggcgggcggcccccag

SEQ ID NO: 1190 - DNA, 20 bp, Artificial
  Synthetically generated peptide
ttcacggcgggcggccccca

SEQ ID NO: 1191 - DNA, 20 bp, Artificial
  Synthetically generated peptide
cttcacggcgggcggccccc

SEQ ID NO: 1192 - DNA, 20 bp, Artificial
  Synthetically generated peptide
tcttcacggcgggcggcccc

SEQ ID NO: 1193 - DNA, 20 bp, Artificial
  Synthetically generated peptide
gtcttcacggcgggcggccc

SEQ ID NO: 1194 - DNA, 20 bp, Artificial
  Synthetically generated peptide
tgtcttcacggcgggcggcc

SEQ ID NO: 1195 - DNA, 20 bp, Artificial
  Synthetically generated peptide
atgtcttcacggcgggcggc

SEQ ID NO: 1196 - DNA, 20 bp, Artificial
  Synthetically generated peptide
gatgtcttcacggcgggcgg

SEQ ID NO: 1197 - DNA, 20 bp, Artificial
  Synthetically generated peptide
cgatgtcttcacggcgggcg

SEQ ID NO: 1198 - DNA, 20 bp, Artificial
  Synthetically generated peptide
gcgatgtcttcacggcgggc

SEQ ID NO: 1199 - DNA, 20 bp, Artificial
  Synthetically generated peptide
cgcgatgtcttcacggcggg

SEQ ID NO: 1200 - DNA, 20 bp, Artificial
  Synthetically generated peptide
ccgcgatgtcttcacggcgg

SEQ ID NO: 1201 - DNA, 20 bp, Artificial
  Synthetically generated peptide
cccgcgatgtcttcacggcg

SEQ ID NO: 1202 - DNA, 20 bp, Artificial
  Synthetically generated peptide
ccccgcgatgtcttcacggc

SEQ ID NO: 1203 - DNA, 20 bp, Artificial
  Synthetically generated peptide
tccccgcgatgtcttcacgg

SEQ ID NO: 1204 - DNA, 20 bp, Artificial
  Synthetically generated peptide
gtccccgcgatgtcttcacg

SEQ ID NO: 1205 - DNA, 20 bp, Artificial
  Synthetically generated peptide
ggtccccgcgatgtcttcac

SEQ ID NO: 1206 - DNA, 20 bp, Artificial
  Synthetically generated peptide
cggtccccgcgatgtcttca

SEQ ID NO: 1207 - DNA, 20 bp, Artificial
  Synthetically generated peptide
tcggtccccgcgatgtcttc

SEQ ID NO: 1208 - DNA, 20 bp, Artificial
  Synthetically generated peptide
atcggtccccgcgatgtctt

SEQ ID NO: 1209 - DNA, 20 bp, Artificial
  Synthetically generated peptide
aatcggtccccgcgatgtct

SEQ ID NO: 1210 - DNA, 20 bp, Artificial
  Synthetically generated peptide
gaatcggtccccgcgatgtc

SEQ ID NO: 1211 - DNA, 20 bp, Artificial
  Synthetically generated peptide
tgaatcggtccccgcgatgt

SEQ ID NO: 1212 - DNA, 20 bp, Artificial
  Synthetically generated peptide
gtgaatcggtccccgcgatg

SEQ ID NO: 1213 - DNA, 20 bp, Artificial
  Synthetically generated peptide
ggtgaatcggtccccgcgat

SEQ ID NO: 1214 - DNA, 28 bp, Artificial
  Synthetically generated peptide
caggccggcgcgcgctcccgcaagcccg

SEQ ID NO: 1215 - DNA, 20 bp, Artificial
  Synthetically generated peptide
aggccggcgcgcgctcccgc

SEQ ID NO: 1216 - DNA, 20 bp, Artificial
  Synthetically generated peptide
ggccggcgcgcgctcccgca

SEQ ID NO: 1217 - DNA, 20 bp, Artificial
  Synthetically generated peptide
gccggcgcgcgctcccgcaa

SEQ ID NO: 1218 - DNA, 20 bp, Artificial
  Synthetically generated peptide
ccggcgcgcgctcccgcaag

SEQ ID NO: 1219 - DNA, 20 bp, Artificial
  Synthetically generated peptide
cggcgcgcgctcccgcaagc

SEQ ID NO: 1220 - DNA, 20 bp, Artificial
  Synthetically generated peptide
ggcgcgcgctcccgcaagcc

SEQ ID NO: 1221 - DNA, 20 bp, Artificial
  Synthetically generated peptide
gcgcgcgctcccgcaagccc

SEQ ID NO: 1222 - DNA, 20 bp, Artificial
  Synthetically generated peptide
cgcgcgctcccgcaagcccg

SEQ ID NO: 1223 - DNA, 20 bp, Artificial
  Synthetically generated peptide
gcgcgctcccgcaagcccgc

SEQ ID NO: 1224 - DNA, 20 bp, Artificial
  Synthetically generated peptide
cgcgctcccgcaagcccgcc

SEQ ID NO: 1225 - DNA, 20 bp, Artificial
  Synthetically generated peptide
gcgctcccgcaagcccgcct

SEQ ID NO: 1226 - DNA, 20 bp, Artificial
  Synthetically generated peptide
cgctcccgcaagcccgcctc

SEQ ID NO: 1227 - DNA, 20 bp, Artificial
  Synthetically generated peptide
gctcccgcaagcccgcctca

SEQ ID NO: 1228 - DNA, 20 bp, Artificial
  Synthetically generated peptide
ctcccgcaagcccgcctcac

SEQ ID NO: 1229 - DNA, 20 bp, Artificial
  Synthetically generated peptide
tcccgcaagcccgcctcacc

SEQ ID NO: 1230 - DNA, 20 bp, Artificial
  Synthetically generated peptide
cccgcaagcccgcctcacct

SEQ ID NO: 1231 - DNA, 20 bp, Artificial
  Synthetically generated peptide
ccgcaagcccgcctcacctg

SEQ ID NO: 1232 - DNA, 20 bp, Artificial
  Synthetically generated peptide
cgcaagcccgcctcacctga

SEQ ID NO: 1233 - DNA, 20 bp, Artificial
  Synthetically generated peptide
gcaagcccgcctcacctgag

SEQ ID NO: 1234 - DNA, 20 bp, Artificial
  Synthetically generated peptide
caagcccgcctcacctgagg

SEQ ID NO: 1235 - DNA, 20 bp, Artificial
  Synthetically generated peptide
aagcccgcctcacctgaggt

SEQ ID NO: 1236 - DNA, 20 bp, Artificial
  Synthetically generated peptide
agcccgcctcacctgaggtg

SEQ ID NO: 1237 - DNA, 20 bp, Artificial
  Synthetically generated peptide
gcccgcctcacctgaggtgg

SEQ ID NO: 1238 - DNA, 20 bp, Artificial
  Synthetically generated peptide
cccgcctcacctgaggtgga

SEQ ID NO: 1239 - DNA, 20 bp, Artificial
  Synthetically generated peptide
ccgcctcacctgaggtggag

SEQ ID NO: 1240 - DNA, 20 bp, Artificial
  Synthetically generated peptide
cgcctcacctgaggtggagg

SEQ ID NO: 1241 - DNA, 20 bp, Artificial
  Synthetically generated peptide
ccaggccggcgcgcgctccc

SEQ ID NO: 1242 - DNA, 20 bp, Artificial
  Synthetically generated peptide
cccaggccggcgcgcgctcc

SEQ ID NO: 1243 - DNA, 20 bp, Artificial
  Synthetically generated peptide
gcccaggccggcgcgcgctc

SEQ ID NO: 1244 - DNA, 20 bp, Artificial
  Synthetically generated peptide
tgcccaggccggcgcgcgct

SEQ ID NO: 1245 - DNA, 20 bp, Artificial
  Synthetically generated peptide
ctgcccaggccggcgcgcgc

SEQ ID NO: 1246 - DNA, 20 bp, Artificial
  Synthetically generated peptide
cctgcccaggccggcgcgcg

SEQ ID NO: 1247 - DNA, 20 bp, Artificial
  Synthetically generated peptide
gcctgcccaggccggcgcgc

SEQ ID NO: 1248 - DNA, 20 bp, Artificial
  Synthetically generated peptide
cgcctgcccaggccggcgcg

SEQ ID NO: 1249 - DNA, 20 bp, Artificial
  Synthetically generated peptide
tcgcctgcccaggccggcgc

SEQ ID NO: 1250 - DNA, 20 bp, Artificial
  Synthetically generated peptide
ctcgcctgcccaggccggcg

SEQ ID NO: 1251 - DNA, 20 bp, Artificial
  Synthetically generated peptide
gctcgcctgcccaggccggc

SEQ ID NO: 1252 - DNA, 20 bp, Artificial
  Synthetically generated peptide
cgctcgcctgcccaggccgg

SEQ ID NO: 1253 - DNA, 20 bp, Artificial
  Synthetically generated peptide
ccgctcgcctgcccaggccg

SEQ ID NO: 1254 - DNA, 20 bp, Artificial
  Synthetically generated peptide
cccgctcgcctgcccaggcc

SEQ ID NO: 1255 - DNA, 20 bp, Artificial
  Synthetically generated peptide
gcccgctcgcctgcccaggc

SEQ ID NO: 1256 - DNA, 20 bp, Artificial
  Synthetically generated peptide
cgcccgctcgcctgcccagg

SEQ ID NO: 1257 - DNA, 20 bp, Artificial
  Synthetically generated peptide
gcgcccgctcgcctgcccag

SEQ ID NO: 1258 - DNA, 20 bp, Artificial
  Synthetically generated peptide
cgcgcccgctcgcctgccca

SEQ ID NO: 1259 - DNA, 20 bp, Artificial
  Synthetically generated peptide
gcgcgcccgctcgcctgccc

SEQ ID NO: 1260 - DNA, 20 bp, Artificial
  Synthetically generated peptide
agcgcgcccgctcgcctgcc

SEQ ID NO: 1261 - DNA, 20 bp, Artificial
  Synthetically generated peptide
gagcgcgcccgctcgcctgc

SEQ ID NO: 1262 - DNA, 20 bp, Artificial
  Synthetically generated peptide
ggagcgcgcccgctcgcctg

SEQ ID NO: 1263 - DNA, 20 bp, Artificial
  Synthetically generated peptide
gggagcgcgcccgctcgcct

SEQ ID NO: 1264 - DNA, 20 bp, Artificial
  Synthetically generated peptide
cgggagcgcgcccgctcgcc

SEQ ID NO: 1265 - DNA, 20 bp, Artificial
  Synthetically generated peptide
gcgggagcgcgcccgctcgc

SEQ ID NO: 1266 - DNA, 20 bp, Artificial
  Synthetically generated peptide
ggcgggagcgcgcccgctcg

SEQ ID NO: 1267 - DNA, 20 bp, Artificial
  Synthetically generated peptide
gggcgggagcgcgcccgctc

SEQ ID NO: 1268 - DNA, 20 bp, Artificial
  Synthetically generated peptide
ggggcgggagcgcgcccgct

SEQ ID NO: 1269 - DNA, 20 bp, Artificial
  Synthetically generated peptide
gggggcgggagcgcgcccgc

SEQ ID NO: 1270 - DNA, 24 bp, Artificial
  Synthetically generated peptide
cgattgccgcccaactctgctggg

SEQ ID NO: 1271 - DNA, 20 bp, Artificial
  Synthetically generated peptide
gattgccgcccaactctgct

SEQ ID NO: 1272 - DNA, 20 bp, Artificial
  Synthetically generated peptide
attgccgcccaactctgctg

SEQ ID NO: 1273 - DNA, 20 bp, Artificial
  Synthetically generated peptide
ttgccgcccaactctgctgg

SEQ ID NO: 1274 - DNA, 20 bp, Artificial
  Synthetically generated peptide
tgccgcccaactctgctggg

SEQ ID NO: 1275 - DNA, 20 bp, Artificial
  Synthetically generated peptide
gccgcccaactctgctgggc

SEQ ID NO: 1276 - DNA, 20 bp, Artificial
  Synthetically generated peptide
ccgcccaactctgctgggct

SEQ ID NO: 1277 - DNA, 20 bp, Artificial
  Synthetically generated peptide
cgcccaactctgctgggctc

SEQ ID NO: 1278 - DNA, 20 bp, Artificial
  Synthetically generated peptide
acgattgccgcccaactctg

SEQ ID NO: 1279 - DNA, 20 bp, Artificial
  Synthetically generated peptide
cacgattgccgcccaactct

SEQ ID NO: 1280 - DNA, 20 bp, Artificial
  Synthetically generated peptide
gcacgattgccgcccaactc

SEQ ID NO: 1281 - DNA, 20 bp, Artificial
  Synthetically generated peptide
ggcacgattgccgcccaact

SEQ ID NO: 1282 - DNA, 20 bp, Artificial
  Synthetically generated peptide
gggcacgattgccgcccaac

SEQ ID NO: 1283 - DNA, 20 bp, Artificial
  Synthetically generated peptide
tgggcacgattgccgcccaa

SEQ ID NO: 1284 - DNA, 20 bp, Artificial
  Synthetically generated peptide
ctgggcacgattgccgccca

SEQ ID NO: 1285 - DNA, 20 bp, Artificial
  Synthetically generated peptide
gctgggcacgattgccgccc

SEQ ID NO: 1286 - DNA, 20 bp, Artificial
  Synthetically generated peptide
tgctgggcacgattgccgcc

SEQ ID NO: 1287 - DNA, 20 bp, Artificial
  Synthetically generated peptide
gtgctgggcacgattgccgc

SEQ ID NO: 1288 - DNA, 20 bp, Artificial
  Synthetically generated peptide
agtgctgggcacgattgccg

SEQ ID NO: 1289 - DNA, 20 bp, Artificial
  Synthetically generated peptide
cagtgctgggcacgattgcc

SEQ ID NO: 1290 - DNA, 20 bp, Artificial
  Synthetically generated peptide
tcagtgctgggcacgattgc

SEQ ID NO: 1291 - DNA, 20 bp, Artificial
  Synthetically generated peptide
ctcagtgctgggcacgattg

SEQ ID NO: 1292 - DNA, 20 bp, Artificial
  Synthetically generated peptide
cctcagtgctgggcacgatt

SEQ ID NO: 1293 - DNA, 20 bp, Artificial
  Synthetically generated peptide
gcctcagtgctgggcacgat

SEQ ID NO: 1294 - DNA, 20 bp, Artificial
  Synthetically generated peptide
ggcctcagtgctgggcacga

SEQ ID NO: 1295 - DNA, 20 bp, Artificial
  Synthetically generated peptide
cggcctcagtgctgggcacg

SEQ ID NO: 1296 - DNA, 20 bp, Artificial
  Synthetically generated peptide
tcggcctcagtgctgggcac

SEQ ID NO: 1297 - DNA, 20 bp, Artificial
  Synthetically generated peptide
ctcggcctcagtgctgggca

SEQ ID NO: 1298 - DNA, 20 bp, Artificial
  Synthetically generated peptide
cctcggcctcagtgctgggc

SEQ ID NO: 1299 - DNA, 20 bp, Artificial
  Synthetically generated peptide
tcctcggcctcagtgctggg

SEQ ID NO: 1300 - DNA, 20 bp, Artificial
  Synthetically generated peptide
ctcctcggcctcagtgctgg

SEQ ID NO: 1301 - DNA, 20 bp, Artificial
  Synthetically generated peptide
tctcctcggcctcagtgctg

SEQ ID NO: 1302 - DNA, 20 bp, Artificial
  Synthetically generated peptide
ttctcctcggcctcagtgct

SEQ ID NO: 1303 - DNA, 20 bp, Artificial
  Synthetically generated peptide
tttctcctcggcctcagtgc

SEQ ID NO: 1304 - DNA, 20 bp, Artificial
  Synthetically generated peptide
ctttctcctcggcctcagtg

SEQ ID NO: 1305 - DNA, 20 bp, Artificial
  Synthetically generated peptide
tctttctcctcggcctcagt

SEQ ID NO: 1306 - DNA, 20 bp, Artificial
  Synthetically generated peptide
ctctttctcctcggcctcag

SEQ ID NO: 1307 - DNA, 20 bp, Artificial
  Synthetically generated peptide
tctctttctcctcggcctca

SEQ ID NO: 1308 - DNA, 20 bp, Artificial
  Synthetically generated peptide
ctctctttctcctcggcctc

SEQ ID NO: 1309 - DNA, 20 bp, Artificial
  Synthetically generated peptide
gctctctttctcctcggcct

SEQ ID NO: 1310 - DNA, 20 bp, Artificial
  Synthetically generated peptide
tgctctctttctcctcggcc

SEQ ID NO: 1311 - DNA, 20 bp, Artificial
  Synthetically generated peptide
ctgctctctttctcctcggc

SEQ ID NO: 1312 - DNA, 20 bp, Artificial
  Synthetically generated peptide
cctgctctctttctcctcgg

SEQ ID NO: 1313 - DNA, 20 bp, Artificial
  Synthetically generated peptide
tcctgctctctttctcctcg

SEQ ID NO: 1314 - DNA, 24 bp, Artificial
  Synthetically generated peptide
acgtcccattcggctcctgagcca

SEQ ID NO: 1315 - DNA, 20 bp, Artificial
  Synthetically generated peptide
cgtcccattcggctcctgag

SEQ ID NO: 1316 - DNA, 20 bp, Artificial
  Synthetically generated peptide
gtcccattcggctcctgagc

SEQ ID NO: 1317 - DNA, 20 bp, Artificial
  Synthetically generated peptide
tcccattcggctcctgagcc

SEQ ID NO: 1318 - DNA, 20 bp, Artificial
  Synthetically generated peptide
cccattcggctcctgagcca

SEQ ID NO: 1319 - DNA, 20 bp, Artificial
  Synthetically generated peptide
ccattcggctcctgagccat

SEQ ID NO: 1320 - DNA, 20 bp, Artificial
  Synthetically generated peptide
cattcggctcctgagccata

SEQ ID NO: 1321 - DNA, 20 bp, Artificial
  Synthetically generated peptide
attcggctcctgagccataa

SEQ ID NO: 1322 - DNA, 20 bp, Artificial
  Synthetically generated peptide
ttcggctcctgagccataag

SEQ ID NO: 1323 - DNA, 20 bp, Artificial
  Synthetically generated peptide
tcggctcctgagccataaga

SEQ ID NO: 1324 - DNA, 20 bp, Artificial
  Synthetically generated peptide
cggctcctgagccataagaa

SEQ ID NO: 1325 - DNA, 20 bp, Artificial
  Synthetically generated peptide
tacgtcccattcggctcctg

SEQ ID NO: 1326 - DNA, 20 bp, Artificial
  Synthetically generated peptide
ttacgtcccattcggctcct

SEQ ID NO: 1327 - DNA, 20 bp, Artificial
  Synthetically generated peptide
tttacgtcccattcggctcc

SEQ ID NO: 1328 - DNA, 20 bp, Artificial
  Synthetically generated peptide
atttacgtcccattcggctc

SEQ ID NO: 1329 - DNA, 20 bp, Artificial
  Synthetically generated peptide
tatttacgtcccattcggct

SEQ ID NO: 1330 - DNA, 20 bp, Artificial
  Synthetically generated peptide
ttatttacgtcccattcggc

SEQ ID NO: 1331 - DNA, 25 bp, Artificial
  Synthetically generated peptide
gacgttgacgaagtctatcacccaa

SEQ ID NO: 1332 - DNA, 20 bp, Artificial
  Synthetically generated peptide
acgttgacgaagtctatcac

SEQ ID NO: 1333 - DNA, 20 bp, Artificial
  Synthetically generated peptide
cgttgacgaagtctatcacc

SEQ ID NO: 1334 - DNA, 20 bp, Artificial
  Synthetically generated peptide
gttgacgaagtctatcaccc

SEQ ID NO: 1335 - DNA, 20 bp, Artificial
  Synthetically generated peptide
ttgacgaagtctatcaccca

SEQ ID NO: 1336 - DNA, 20 bp, Artificial
  Synthetically generated peptide
tgacgaagtctatcacccaa

SEQ ID NO: 1337 - DNA, 20 bp, Artificial
  Synthetically generated peptide
gacgaagtctatcacccaag

SEQ ID NO: 1338 - DNA, 20 bp, Artificial
  Synthetically generated peptide
acgaagtctatcacccaaga

SEQ ID NO: 1339 - DNA, 20 bp, Artificial
  Synthetically generated peptide
cgaagtctatcacccaagaa

SEQ ID NO: 1340 - DNA, 20 bp, Artificial
  Synthetically generated peptide
agacgttgacgaagtctatc

SEQ ID NO: 1341 - DNA, 22 bp, Artificial
  Synthetically generated peptide
acggagtatgacgaaagttttc

SEQ ID NO: 1342 - DNA, 20 bp, Artificial
  Synthetically generated peptide
gagcgagactcccgtctaaa

SEQ ID NO: 1343 - DNA, 20 bp, Artificial
  Synthetically generated peptide
agcgagactcccgtctaaaa

SEQ ID NO: 1344 - DNA, 20 bp, Artificial
  Synthetically generated peptide
gcgagactcccgtctaaaaa

SEQ ID NO: 1345 - DNA, 20 bp, Artificial
  Synthetically generated peptide
cgagactcccgtctaaaaaa

SEQ ID NO: 1346 - DNA, 20 bp, Artificial
  Synthetically generated peptide
gagactcccgtctaaaaaag

SEQ ID NO: 1347 - DNA, 20 bp, Artificial
  Synthetically generated peptide
agagcgagactcccgtctaa

SEQ ID NO: 1348 - DNA, 20 bp, Artificial
  Synthetically generated peptide
aagagcgagactcccgtcta

SEQ ID NO: 1349 - DNA, 20 bp, Artificial
  Synthetically generated peptide
aaagagcgagactcccgtct

SEQ ID NO: 1350 - DNA, 20 bp, Artificial
  Synthetically generated peptide
gaaagagcgagactcccgtc

SEQ ID NO: 1351 - DNA, 20 bp, Artificial
  Synthetically generated peptide
tgaaagagcgagactcccgt

SEQ ID NO: 1352 - DNA, 20 bp, Artificial
  Synthetically generated peptide
gtgaaagagcgagactcccg

SEQ ID NO: 1353 - DNA, 20 bp, Artificial
  Synthetically generated peptide
ggtgaaagagcgagactccc

SEQ ID NO: 1354 - DNA, 23 bp, Artificial
  Synthetically generated peptide
cccggagcgggaccggaccgcgg

SEQ ID NO: 1355 - DNA, 20 bp, Artificial
  Synthetically generated peptide
ccggagcgggaccggaccgc

SEQ ID NO: 1356 - DNA, 20 bp, Artificial
  Synthetically generated peptide
cggagcgggaccggaccgcg

SEQ ID NO: 1357 - DNA, 20 bp, Artificial
  Synthetically generated peptide
acccggagcgggaccggacc

SEQ ID NO: 1358 - DNA, 20 bp, Artificial
  Synthetically generated peptide
gacccggagcgggaccggac

SEQ ID NO: 1359 - DNA, 20 bp, Artificial
  Synthetically generated peptide
tgacccggagcgggaccgga

SEQ ID NO: 1360 - DNA, 20 bp, Artificial
  Synthetically generated peptide
ctgacccggagcgggaccgg

SEQ ID NO: 1361 - DNA, 20 bp, Artificial
  Synthetically generated peptide
tctgacccggagcgggaccg

SEQ ID NO: 1362 - DNA, 20 bp, Artificial
  Synthetically generated peptide
ttctgacccggagcgggacc

SEQ ID NO: 1363 - DNA, 20 bp, Artificial
  Synthetically generated peptide
attctgacccggagcgggac

SEQ ID NO: 1364 - DNA, 20 bp, Artificial
  Synthetically generated peptide
aattctgacccggagcggga

SEQ ID NO: 1365 - DNA, 20 bp, Artificial
  Synthetically generated peptide
caattctgacccggagcggg

SEQ ID NO: 1366 - DNA, 20 bp, Artificial
  Synthetically generated peptide
ccaattctgacccggagcgg

SEQ ID NO: 1367 - DNA, 20 bp, Artificial
  Synthetically generated peptide
gccaattctgacccggagcg

SEQ ID NO: 1368 - DNA, 20 bp, Artificial
  Synthetically generated peptide
cgccaattctgacccggagc

SEQ ID NO: 1369 - DNA, 20 bp, Artificial
  Synthetically generated peptide
ccgccaattctgacccggag

SEQ ID NO: 1370 - DNA, 20 bp, Artificial
  Synthetically generated peptide
gccgccaattctgacccgga

SEQ ID NO: 1371 - DNA, 20 bp, Artificial
  Synthetically generated peptide
agccgccaattctgacccgg

SEQ ID NO: 1372 - DNA, 20 bp, Artificial
  Synthetically generated peptide
cagccgccaattctgacccg

SEQ ID NO: 1373 - DNA, 20 bp, Artificial
  Synthetically generated peptide
gcagccgccaattctgaccc

SEQ ID NO: 1374 - DNA, 20 bp, Artificial
  Synthetically generated peptide
cgcagccgccaattctgacc

SEQ ID NO: 1375 - DNA, 20 bp, Artificial
  Synthetically generated peptide
ccgcagccgccaattctgac

SEQ ID NO: 1376 - DNA, 20 bp, Artificial
  Synthetically generated peptide
cccgcagccgccaattctga

SEQ ID NO: 1377 - DNA, 20 bp, Artificial
  Synthetically generated peptide
ccccgcagccgccaattctg

SEQ ID NO: 1378 - DNA, 20 bp, Artificial
  Synthetically generated peptide
tccccgcagccgccaattct

SEQ ID NO: 1379 - DNA, 20 bp, Artificial
  Synthetically generated peptide
gtccccgcagccgccaattc

SEQ ID NO: 1380 - DNA, 20 bp, Artificial
  Synthetically generated peptide
tgtccccgcagccgccaatt

SEQ ID NO: 1381 - DNA, 20 bp, Artificial
  Synthetically generated peptide
ctgtccccgcagccgccaat

SEQ ID NO: 1382 - DNA, 20 bp, Artificial
  Synthetically generated peptide
gctgtccccgcagccgccaa

SEQ ID NO: 1383 - DNA, 20 bp, Artificial
  Synthetically generated peptide
ggctgtccccgcagccgcca

SEQ ID NO: 1384 - DNA, 20 bp, Artificial
  Synthetically generated peptide
aggctgtccccgcagccgcc

SEQ ID NO: 1385 - DNA, 20 bp, Artificial
  Synthetically generated peptide
aaggctgtccccgcagccgc

SEQ ID NO: 1386 - DNA, 20 bp, Artificial
  Synthetically generated peptide
caaggctgtccccgcagccg

SEQ ID NO: 1387 - DNA, 20 bp, Artificial
  Synthetically generated peptide
gcaaggctgtccccgcagcc

SEQ ID NO: 1388 - DNA, 20 bp, Artificial
  Synthetically generated peptide
cgcaaggctgtccccgcagc

SEQ ID NO: 1389 - DNA, 20 bp, Artificial
  Synthetically generated peptide
ccgcaaggctgtccccgcag

SEQ ID NO: 1390 - DNA, 20 bp, Artificial
  Synthetically generated peptide
gccgcaaggctgtccccgca

SEQ ID NO: 1391 - DNA, 20 bp, Artificial
  Synthetically generated peptide
agccgcaaggctgtccccgc

SEQ ID NO: 1392 - DNA, 20 bp, Artificial
  Synthetically generated peptide
tagccgcaaggctgtccccg

SEQ ID NO: 1393 - DNA, 20 bp, Artificial
  Synthetically generated peptide
ctagccgcaaggctgtcccc

SEQ ID NO: 1394 - DNA, 20 bp, Artificial
  Synthetically generated peptide
cctagccgcaaggctgtccc

SEQ ID NO: 1395 - DNA, 20 bp, Artificial
  Synthetically generated peptide
gcctagccgcaaggctgtcc

SEQ ID NO: 1396 - DNA, 20 bp, Artificial
  Synthetically generated peptide
tgcctagccgcaaggctgtc

SEQ ID NO: 1397 - DNA, 20 bp, Artificial
  Synthetically generated peptide
ctgcctagccgcaaggctgt

SEQ ID NO: 1398 - DNA, 20 bp, Artificial
  Synthetically generated peptide
cctgcctagccgcaaggctg

SEQ ID NO: 1399 - DNA, 20 bp, Artificial
  Synthetically generated peptide
ccctgcctagccgcaaggct

SEQ ID NO: 1400 - DNA, 20 bp, Artificial
  Synthetically generated peptide
cccctgcctagccgcaaggc

SEQ ID NO: 1401 - DNA, 20 bp, Artificial
  Synthetically generated peptide
ccccctgcctagccgcaagg

SEQ ID NO: 1402 - DNA, 20 bp, Artificial
  Synthetically generated peptide
gccccctgcctagccgcaag

SEQ ID NO: 1403 - DNA, 20 bp, Artificial
  Synthetically generated peptide
cgccccctgcctagccgcaa

SEQ ID NO: 1404 - DNA, 20 bp, Artificial
  Synthetically generated peptide
ccgccccctgcctagccgca

SEQ ID NO: 1405 - DNA, 20 bp, Artificial
  Synthetically generated peptide
cccgccccctgcctagccgc

SEQ ID NO: 1406 - DNA, 20 bp, Artificial
  Synthetically generated peptide
gcccgccccctgcctagccg

SEQ ID NO: 1407 - DNA, 20 bp, Artificial
  Synthetically generated peptide
ggcccgccccctgcctagcc

SEQ ID NO: 1408 - DNA, 20 bp, Artificial
  Synthetically generated peptide
cggcccgccccctgcctagc

SEQ ID NO: 1409 - DNA, 20 bp, Artificial
  Synthetically generated peptide
gcggcccgccccctgcctag

SEQ ID NO: 1410 - DNA, 20 bp, Artificial
  Synthetically generated peptide
ggcggcccgccccctgccta

SEQ ID NO: 1411 - DNA, 20 bp, Artificial
  Synthetically generated peptide
cggcggcccgccccctgcct

SEQ ID NO: 1412 - DNA, 20 bp, Artificial
  Synthetically generated peptide
gcggcggcccgccccctgcc

SEQ ID NO: 1413 - DNA, 20 bp, Artificial
  Synthetically generated peptide
cgcggcggcccgccccctgc

SEQ ID NO: 1414 - DNA, 20 bp, Artificial
  Synthetically generated peptide
acgcggcggcccgccccctg

SEQ ID NO: 1415 - DNA, 20 bp, Artificial
  Synthetically generated peptide
cacgcggcggcccgccccct

SEQ ID NO: 1416 - DNA, 20 bp, Artificial
  Synthetically generated peptide
ccacgcggcggcccgccccc

SEQ ID NO: 1417 - DNA, 20 bp, Artificial
  Synthetically generated peptide
cccacgcggcggcccgcccc

SEQ ID NO: 1418 - DNA, 20 bp, Artificial
  Synthetically generated peptide
acccacgcggcggcccgccc

SEQ ID NO: 1419 - DNA, 20 bp, Artificial
  Synthetically generated peptide
gacccacgcggcggcccgcc

SEQ ID NO: 1420 - DNA, 20 bp, Artificial
  Synthetically generated peptide
ggacccacgcggcggcccgc

SEQ ID NO: 1421 - DNA, 20 bp, Artificial
  Synthetically generated peptide
cggacccacgcggcggcccg

SEQ ID NO: 1422 - DNA, 20 bp, Artificial
  Synthetically generated peptide
ccggacccacgcggcggccc

SEQ ID NO: 1423 - DNA, 20 bp, Artificial
  Synthetically generated peptide
gccggacccacgcggcggcc

SEQ ID NO: 1424 - DNA, 20 bp, Artificial
  Synthetically generated peptide
tgccggacccacgcggcggc

SEQ ID NO: 1425 - DNA, 20 bp, Artificial
  Synthetically generated peptide
ctgccggacccacgcggcgg

SEQ ID NO: 1426 - DNA, 20 bp, Artificial
  Synthetically generated peptide
actgccggacccacgcggcg

SEQ ID NO: 1427 - DNA, 20 bp, Artificial
  Synthetically generated peptide
gactgccggacccacgcggc

SEQ ID NO: 1428 - DNA, 20 bp, Artificial
  Synthetically generated peptide
ggactgccggacccacgcgg

SEQ ID NO: 1429 - DNA, 20 bp, Artificial
  Synthetically generated peptide
gggactgccggacccacgcg

SEQ ID NO: 1430 - DNA, 20 bp, Artificial
  Synthetically generated peptide
agggactgccggacccacgc

SEQ ID NO: 1431 - DNA, 20 bp, Artificial
  Synthetically generated peptide
gagggactgccggacccacg

SEQ ID NO: 1432 - DNA, 20 bp, Artificial
  Synthetically generated peptide
ggagggactgccggacccac

SEQ ID NO: 1433 - DNA, 20 bp, Artificial
  Synthetically generated peptide
aggagggactgccggaccca

SEQ ID NO: 1434 - DNA, 20 bp, Artificial
  Synthetically generated peptide
gaggagggactgccggaccc

SEQ ID NO: 1435 - DNA, 24 bp, Artificial
  Synthetically generated peptide
gccggacccacgcggcggcccgcc

SEQ ID NO: 1436 - DNA, 20 bp, Artificial
  Synthetically generated peptide
ccggacccacgcggcggccc

SEQ ID NO: 1437 - DNA, 20 bp, Artificial
  Synthetically generated peptide
cggacccacgcggcggcccg

SEQ ID NO: 1438 - DNA, 20 bp, Artificial
  Synthetically generated peptide
ggacccacgcggcggcccgc

SEQ ID NO: 1439 - DNA, 20 bp, Artificial
  Synthetically generated peptide
gacccacgcggcggcccgcc

SEQ ID NO: 1440 - DNA, 20 bp, Artificial
  Synthetically generated peptide
acccacgcggcggcccgccc

SEQ ID NO: 1441 - DNA, 20 bp, Artificial
  Synthetically generated peptide
cccacgcggcggcccgcccc

SEQ ID NO: 1442 - DNA, 20 bp, Artificial
  Synthetically generated peptide
ccacgcggcggcccgccccc

SEQ ID NO: 1443 - DNA, 20 bp, Artificial
  Synthetically generated peptide
cacgcggcggcccgccccct

SEQ ID NO: 1444 - DNA, 20 bp, Artificial
  Synthetically generated peptide
acgcggcggcccgccccctg

SEQ ID NO: 1445 - DNA, 20 bp, Artificial
  Synthetically generated peptide
cgcggcggcccgccccctgc

SEQ ID NO: 1446 - DNA, 20 bp, Artificial
  Synthetically generated peptide
gcggcggcccgccccctgcc

SEQ ID NO: 1447 - DNA, 20 bp, Artificial
  Synthetically generated peptide
cggcggcccgccccctgcct

SEQ ID NO: 1448 - DNA, 20 bp, Artificial
  Synthetically generated peptide
ggcggcccgccccctgccta

SEQ ID NO: 1449 - DNA, 20 bp, Artificial
  Synthetically generated peptide
gcggcccgccccctgcctag

SEQ ID NO: 1450 - DNA, 20 bp, Artificial
  Synthetically generated peptide
cggcccgccccctgcctagc

SEQ ID NO: 1451 - DNA, 20 bp, Artificial
  Synthetically generated peptide
ggcccgccccctgcctagcc

SEQ ID NO: 1452 - DNA, 20 bp, Artificial
  Synthetically generated peptide
gcccgccccctgcctagccg

SEQ ID NO: 1453 - DNA, 20 bp, Artificial
  Synthetically generated peptide
cccgccccctgcctagccgc

SEQ ID NO: 1454 - DNA, 20 bp, Artificial
  Synthetically generated peptide
ccgccccctgcctagccgca

SEQ ID NO: 1455 - DNA, 20 bp, Artificial
  Synthetically generated peptide
cgccccctgcctagccgcaa

SEQ ID NO: 1456 - DNA, 20 bp, Artificial
  Synthetically generated peptide
gccccctgcctagccgcaag

SEQ ID NO: 1457 - DNA, 20 bp, Artificial
  Synthetically generated peptide
ccccctgcctagccgcaagg

SEQ ID NO: 1458 - DNA, 20 bp, Artificial
  Synthetically generated peptide
cccctgcctagccgcaaggc

SEQ ID NO: 1459 - DNA, 20 bp, Artificial
  Synthetically generated peptide
ccctgcctagccgcaaggct

SEQ ID NO: 1460 - DNA, 20 bp, Artificial
  Synthetically generated peptide
cctgcctagccgcaaggctg

SEQ ID NO: 1461 - DNA, 20 bp, Artificial
  Synthetically generated peptide
ctgcctagccgcaaggctgt

SEQ ID NO: 1462 - DNA, 20 bp, Artificial
  Synthetically generated peptide
tgcctagccgcaaggctgtc

SEQ ID NO: 1463 - DNA, 20 bp, Artificial
  Synthetically generated peptide
gcctagccgcaaggctgtcc

SEQ ID NO: 1464 - DNA, 20 bp, Artificial
  Synthetically generated peptide
cctagccgcaaggctgtccc

SEQ ID NO: 1465 - DNA, 20 bp, Artificial
  Synthetically generated peptide
ctagccgcaaggctgtcccc

SEQ ID NO: 1466 - DNA, 20 bp, Artificial
  Synthetically generated peptide
tagccgcaaggctgtccccg

SEQ ID NO: 1467 - DNA, 20 bp, Artificial
  Synthetically generated peptide
agccgcaaggctgtccccgc

SEQ ID NO: 1468 - DNA, 20 bp, Artificial
  Synthetically generated peptide
gccgcaaggctgtccccgca

SEQ ID NO: 1469 - DNA, 20 bp, Artificial
  Synthetically generated peptide
ccgcaaggctgtccccgcag

SEQ ID NO: 1470 - DNA, 20 bp, Artificial
  Synthetically generated peptide
cgcaaggctgtccccgcagc

SEQ ID NO: 1471 - DNA, 20 bp, Artificial
  Synthetically generated peptide
gcaaggctgtccccgcagcc

SEQ ID NO: 1472 - DNA, 20 bp, Artificial
  Synthetically generated peptide
caaggctgtccccgcagccg

SEQ ID NO: 1473 - DNA, 20 bp, Artificial
  Synthetically generated peptide
aaggctgtccccgcagccgc

SEQ ID NO: 1474 - DNA, 20 bp, Artificial
  Synthetically generated peptide
aggctgtccccgcagccgcc

SEQ ID NO: 1475 - DNA, 20 bp, Artificial
  Synthetically generated peptide
ggctgtccccgcagccgcca

SEQ ID NO: 1476 - DNA, 20 bp, Artificial
  Synthetically generated peptide
gctgtccccgcagccgccaa

SEQ ID NO: 1477 - DNA, 20 bp, Artificial
  Synthetically generated peptide
ctgtccccgcagccgccaat

SEQ ID NO: 1478 - DNA, 20 bp, Artificial
  Synthetically generated peptide
tgtccccgcagccgccaatt

SEQ ID NO: 1479 - DNA, 20 bp, Artificial
  Synthetically generated peptide
gtccccgcagccgccaattc

SEQ ID NO: 1480 - DNA, 20 bp, Artificial
  Synthetically generated peptide
tccccgcagccgccaattct

SEQ ID NO: 1481 - DNA, 20 bp, Artificial
  Synthetically generated peptide
ccccgcagccgccaattctg

SEQ ID NO: 1482 - DNA, 20 bp, Artificial
  Synthetically generated peptide
cccgcagccgccaattctga

SEQ ID NO: 1483 - DNA, 20 bp, Artificial
  Synthetically generated peptide
ccgcagccgccaattctgac

SEQ ID NO: 1484 - DNA, 20 bp, Artificial
  Synthetically generated peptide
cgcagccgccaattctgacc

SEQ ID NO: 1485 - DNA, 20 bp, Artificial
  Synthetically generated peptide
gcagccgccaattctgaccc

SEQ ID NO: 1486 - DNA, 20 bp, Artificial
  Synthetically generated peptide
cagccgccaattctgacccg

SEQ ID NO: 1487 - DNA, 20 bp, Artificial
  Synthetically generated peptide
agccgccaattctgacccgg

SEQ ID NO: 1488 - DNA, 20 bp, Artificial
  Synthetically generated peptide
gccgccaattctgacccgga

SEQ ID NO: 1489 - DNA, 20 bp, Artificial
  Synthetically generated peptide
ccgccaattctgacccggag

SEQ ID NO: 1490 - DNA, 20 bp, Artificial
  Synthetically generated peptide
cgccaattctgacccggagc

SEQ ID NO: 1491 - DNA, 20 bp, Artificial
  Synthetically generated peptide
gccaattctgacccggagcg

SEQ ID NO: 1492 - DNA, 20 bp, Artificial
  Synthetically generated peptide
ccaattctgacccggagcgg

SEQ ID NO: 1493 - DNA, 20 bp, Artificial
  Synthetically generated peptide
caattctgacccggagcggg

SEQ ID NO: 1494 - DNA, 20 bp, Artificial
  Synthetically generated peptide
aattctgacccggagcggga

SEQ ID NO: 1495 - DNA, 20 bp, Artificial
  Synthetically generated peptide
attctgacccggagcgggac

SEQ ID NO: 1496 - DNA, 20 bp, Artificial
  Synthetically generated peptide
ttctgacccggagcgggacc

SEQ ID NO: 1497 - DNA, 20 bp, Artificial
  Synthetically generated peptide
tctgacccggagcgggaccg

SEQ ID NO: 1498 - DNA, 20 bp, Artificial
  Synthetically generated peptide
ctgacccggagcgggaccgg

SEQ ID NO: 1499 - DNA, 20 bp, Artificial
  Synthetically generated peptide
tgacccggagcgggaccgga

SEQ ID NO: 1500 - DNA, 20 bp, Artificial
  Synthetically generated peptide
gacccggagcgggaccggac

SEQ ID NO: 1501 - DNA, 20 bp, Artificial
  Synthetically generated peptide
acccggagcgggaccggacc

SEQ ID NO: 1502 - DNA, 20 bp, Artificial
  Synthetically generated peptide
cccggagcgggaccggaccg

SEQ ID NO: 1503 - DNA, 20 bp, Artificial
  Synthetically generated peptide
ccggagcgggaccggaccgc

SEQ ID NO: 1504 - DNA, 20 bp, Artificial
  Synthetically generated peptide
cggagcgggaccggaccgcg

SEQ ID NO: 1505 - DNA, 20 bp, Artificial
  Synthetically generated peptide
tgccggacccacgcggcggc

SEQ ID NO: 1506 - DNA, 20 bp, Artificial
  Synthetically generated peptide
ctgccggacccacgcggcgg

SEQ ID NO: 1507 - DNA, 20 bp, Artificial
  Synthetically generated peptide
actgccggacccacgcggcg

SEQ ID NO: 1508 - DNA, 20 bp, Artificial
  Synthetically generated peptide
gactgccggacccacgcggc

SEQ ID NO: 1509 - DNA, 20 bp, Artificial
  Synthetically generated peptide
ggactgccggacccacgcgg

SEQ ID NO: 1510 - DNA, 20 bp, Artificial
  Synthetically generated peptide
gggactgccggacccacgcg

SEQ ID NO: 1511 - DNA, 20 bp, Artificial
  Synthetically generated peptide
agggactgccggacccacgc

SEQ ID NO: 1512 - DNA, 20 bp, Artificial
  Synthetically generated peptide
gagggactgccggacccacg

SEQ ID NO: 1513 - DNA, 20 bp, Artificial
  Synthetically generated peptide
ggagggactgccggacccac

SEQ ID NO: 1514 - DNA, 20 bp, Artificial
  Synthetically generated peptide
aggagggactgccggaccca

SEQ ID NO: 1515 - DNA, 20 bp, Artificial
  Synthetically generated peptide
gaggagggactgccggaccc

SEQ ID NO: 1516 - DNA, 21 bp, Artificial
  Synthetically generated peptide
agtctccccttcccggagact

SEQ ID NO: 1517 - DNA, 20 bp, Artificial
  Synthetically generated peptide
gtctccccttcccggagact

SEQ ID NO: 1518 - DNA, 20 bp, Artificial
  Synthetically generated peptide
tctccccttcccggagactt

SEQ ID NO: 1519 - DNA, 20 bp, Artificial
  Synthetically generated peptide
ctccccttcccggagactta

SEQ ID NO: 1520 - DNA, 20 bp, Artificial
  Synthetically generated peptide
tccccttcccggagacttaa

SEQ ID NO: 1521 - DNA, 20 bp, Artificial
  Synthetically generated peptide
ccccttcccggagacttaat

SEQ ID NO: 1522 - DNA, 20 bp, Artificial
  Synthetically generated peptide
cccttcccggagacttaatc

SEQ ID NO: 1523 - DNA, 20 bp, Artificial
  Synthetically generated peptide
ccttcccggagacttaatct

SEQ ID NO: 1524 - DNA, 20 bp, Artificial
  Synthetically generated peptide
cttcccggagacttaatctt

SEQ ID NO: 1525 - DNA, 20 bp, Artificial
  Synthetically generated peptide
ttcccggagacttaatcttg

SEQ ID NO: 1526 - DNA, 20 bp, Artificial
  Synthetically generated peptide
tcccggagacttaatcttgc

SEQ ID NO: 1527 - DNA, 20 bp, Artificial
  Synthetically generated peptide
cccggagacttaatcttgct

SEQ ID NO: 1528 - DNA, 20 bp, Artificial
  Synthetically generated peptide
ccggagacttaatcttgctt

SEQ ID NO: 1529 - DNA, 20 bp, Artificial
  Synthetically generated peptide
cggagacttaatcttgcttc

SEQ ID NO: 1530 - DNA, 20 bp, Artificial
  Synthetically generated peptide
aagtctccccttcccggaga

SEQ ID NO: 1531 - DNA, 20 bp, Artificial
  Synthetically generated peptide
taagtctccccttcccggag

SEQ ID NO: 1532 - DNA, 20 bp, Artificial
  Synthetically generated peptide
ttaagtctccccttcccgga

SEQ ID NO: 1533 - DNA, 20 bp, Artificial
  Synthetically generated peptide
gttaagtctccccttcccgg

SEQ ID NO: 1534 - DNA, 20 bp, Artificial
  Synthetically generated peptide
agttaagtctccccttcccg

SEQ ID NO: 1535 - DNA, 24 bp, Artificial
  Synthetically generated peptide
gccgggccggctggagagcgggtc

SEQ ID NO: 1536 - DNA, 20 bp, Artificial
  Synthetically generated peptide
ccgggccggctggagagcgg

SEQ ID NO: 1537 - DNA, 20 bp, Artificial
  Synthetically generated peptide
agccgggccggctggagagc

SEQ ID NO: 1538 - DNA, 22 bp, Artificial
  Synthetically generated peptide
tcgcccctcctccgagactttc

SEQ ID NO: 1539 - DNA, 20 bp, Artificial
  Synthetically generated peptide
cgcccctcctccgagacttt

SEQ ID NO: 1540 - DNA, 20 bp, Artificial
  Synthetically generated peptide
gcccctcctccgagactttc

SEQ ID NO: 1541 - DNA, 20 bp, Artificial
  Synthetically generated peptide
cccctcctccgagactttca

SEQ ID NO: 1542 - DNA, 20 bp, Artificial
  Synthetically generated peptide
ccctcctccgagactttcag

SEQ ID NO: 1543 - DNA, 20 bp, Artificial
  Synthetically generated peptide
cctcctccgagactttcagt

SEQ ID NO: 1544 - DNA, 20 bp, Artificial
  Synthetically generated peptide
ctcctccgagactttcagtt

SEQ ID NO: 1545 - DNA, 20 bp, Artificial
  Synthetically generated peptide
tcctccgagactttcagttc

SEQ ID NO: 1546 - DNA, 20 bp, Artificial
  Synthetically generated peptide
cctccgagactttcagttcc

SEQ ID NO: 1547 - DNA, 20 bp, Artificial
  Synthetically generated peptide
ctccgagactttcagttcca

SEQ ID NO: 1548 - DNA, 20 bp, Artificial
  Synthetically generated peptide
tccgagactttcagttccat

SEQ ID NO: 1549 - DNA, 20 bp, Artificial
  Synthetically generated peptide
ccgagactttcagttccatt

SEQ ID NO: 1550 - DNA, 20 bp, Artificial
  Synthetically generated peptide
cgagactttcagttccattc

SEQ ID NO: 1551 - DNA, 20 bp, Artificial
  Synthetically generated peptide
atcgcccctcctccgagact

SEQ ID NO: 1552 - DNA, 20 bp, Artificial
  Synthetically generated peptide
gatcgcccctcctccgagac

SEQ ID NO: 1553 - DNA, 20 bp, Artificial
  Synthetically generated peptide
ggatcgcccctcctccgaga

SEQ ID NO: 1554 - DNA, 20 bp, Artificial
  Synthetically generated peptide
aggatcgcccctcctccgag

SEQ ID NO: 1555 - DNA, 20 bp, Artificial
  Synthetically generated peptide
taggatcgcccctcctccga

SEQ ID NO: 1556 - DNA, 20 bp, Artificial
  Synthetically generated peptide
ataggatcgcccctcctccg

SEQ ID NO: 1557 - DNA, 20 bp, Artificial
  Synthetically generated peptide
gataggatcgcccctcctcc

SEQ ID NO: 1558 - DNA, 20 bp, Artificial
  Synthetically generated peptide
tgataggatcgcccctcctc

SEQ ID NO: 1559 - DNA, 20 bp, Artificial
  Synthetically generated peptide
ctgataggatcgcccctcct

SEQ ID NO: 1560 - DNA, 20 bp, Artificial
  Synthetically generated peptide
cctgataggatcgcccctcc

SEQ ID NO: 1561 - DNA, 20 bp, Artificial
  Synthetically generated peptide
acctgataggatcgcccctc

SEQ ID NO: 1562 - DNA, 20 bp, Artificial
  Synthetically generated peptide
tacctgataggatcgcccct

SEQ ID NO: 1563 - DNA, 20 bp, Artificial
  Synthetically generated peptide
gtacctgataggatcgcccc

SEQ ID NO: 1564 - DNA, 20 bp, Artificial
  Synthetically generated peptide
tgtacctgataggatcgccc

SEQ ID NO: 1565 - DNA, 20 bp, Artificial
  Synthetically generated peptide
ctgtacctgataggatcgcc

SEQ ID NO: 1566 - DNA, 20 bp, Artificial
  Synthetically generated peptide
cctgtacctgataggatcgc

SEQ ID NO: 1567 - DNA, 20 bp, Artificial
  Synthetically generated peptide
gcctgtacctgataggatcg

SEQ ID NO: 1568 - DNA, 20 bp, Artificial
  Synthetically generated peptide
cgcctgtacctgataggatc

SEQ ID NO: 1569 - DNA, 20 bp, Artificial
  Synthetically generated peptide
gcgcctgtacctgataggat

SEQ ID NO: 1570 - DNA, 20 bp, Artificial
  Synthetically generated peptide
agcgcctgtacctgatagga

SEQ ID NO: 1571 - DNA, 20 bp, Artificial
  Synthetically generated peptide
cagcgcctgtacctgatagg

SEQ ID NO: 1572 - DNA, 20 bp, Artificial
  Synthetically generated peptide
gcagcgcctgtacctgatag

SEQ ID NO: 1573 - DNA, 20 bp, Artificial
  Synthetically generated peptide
agcagcgcctgtacctgata

SEQ ID NO: 1574 - DNA, 20 bp, Artificial
  Synthetically generated peptide
aagcagcgcctgtacctgat

SEQ ID NO: 1575 - DNA, 20 bp, Artificial
  Synthetically generated peptide
aaagcagcgcctgtacctga

SEQ ID NO: 1576 - DNA, 20 bp, Artificial
  Synthetically generated peptide
aaaagcagcgcctgtacctg

SEQ ID NO: 1577 - DNA, 20 bp, Artificial
  Synthetically generated peptide
gaaaagcagcgcctgtacct

SEQ ID NO: 1578 - DNA, 20 bp, Artificial
  Synthetically generated peptide
ggaaaagcagcgcctgtacc

SEQ ID NO: 1579 - DNA, 20 bp, Artificial
  Synthetically generated peptide
tggaaaagcagcgcctgtac

SEQ ID NO: 1580 - DNA, 20 bp, Artificial
  Synthetically generated peptide
ctggaaaagcagcgcctgta

SEQ ID NO: 1581 - DNA, 20 bp, Artificial
  Synthetically generated peptide
gctggaaaagcagcgcctgt

SEQ ID NO: 1582 - DNA, 20 bp, Artificial
  Synthetically generated peptide
ggctggaaaagcagcgcctg

SEQ ID NO: 1583 - DNA, 20 bp, Artificial
  Synthetically generated peptide
gggctggaaaagcagcgcct

SEQ ID NO: 1584 - DNA, 25 bp, Artificial
  Synthetically generated peptide
gcaccccgccaccctcagggtcggc

SEQ ID NO: 1585 - DNA, 20 bp, Artificial
  Synthetically generated peptide
caccccgccaccctcagggt

SEQ ID NO: 1586 - DNA, 20 bp, Artificial
  Synthetically generated peptide
accccgccaccctcagggtc

SEQ ID NO: 1587 - DNA, 20 bp, Artificial
  Synthetically generated peptide
ccccgccaccctcagggtcg

SEQ ID NO: 1588 - DNA, 20 bp, Artificial
  Synthetically generated peptide
cccgccaccctcagggtcgg

SEQ ID NO: 1589 - DNA, 20 bp, Artificial
  Synthetically generated peptide
ccgccaccctcagggtcggc

SEQ ID NO: 1590 - DNA, 20 bp, Artificial
  Synthetically generated peptide
cgccaccctcagggtcggcc

SEQ ID NO: 1591 - DNA, 20 bp, Artificial
  Synthetically generated peptide
gccaccctcagggtcggcct

SEQ ID NO: 1592 - DNA, 20 bp, Artificial
  Synthetically generated peptide
ccaccctcagggtcggccta

SEQ ID NO: 1593 - DNA, 20 bp, Artificial
  Synthetically generated peptide
caccctcagggtcggcctat

SEQ ID NO: 1594 - DNA, 20 bp, Artificial
  Synthetically generated peptide
accctcagggtcggcctata

SEQ ID NO: 1595 - DNA, 20 bp, Artificial
  Synthetically generated peptide
ccctcagggtcggcctatac

SEQ ID NO: 1596 - DNA, 20 bp, Artificial
  Synthetically generated peptide
cctcagggtcggcctatact

SEQ ID NO: 1597 - DNA, 20 bp, Artificial
  Synthetically generated peptide
ctcagggtcggcctatactg

SEQ ID NO: 1598 - DNA, 20 bp, Artificial
  Synthetically generated peptide
tcagggtcggcctatactgg

SEQ ID NO: 1599 - DNA, 20 bp, Artificial
  Synthetically generated peptide
cagggtcggcctatactggc

SEQ ID NO: 1600 - DNA, 20 bp, Artificial
  Synthetically generated peptide
agggtcggcctatactggcg

SEQ ID NO: 1601 - DNA, 20 bp, Artificial
  Synthetically generated peptide
gggtcggcctatactggcgc

SEQ ID NO: 1602 - DNA, 20 bp, Artificial
  Synthetically generated peptide
ggtcggcctatactggcgcg

SEQ ID NO: 1603 - DNA, 20 bp, Artificial
  Synthetically generated peptide
gtcggcctatactggcgcgc

SEQ ID NO: 1604 - DNA, 20 bp, Artificial
  Synthetically generated peptide
tcggcctatactggcgcgca

SEQ ID NO: 1605 - DNA, 20 bp, Artificial
  Synthetically generated peptide
cggcctatactggcgcgcat

SEQ ID NO: 1606 - DNA, 20 bp, Artificial
  Synthetically generated peptide
ggcctatactggcgcgcatc

SEQ ID NO: 1607 - DNA, 20 bp, Artificial
  Synthetically generated peptide
gcctatactggcgcgcatcc

SEQ ID NO: 1608 - DNA, 20 bp, Artificial
  Synthetically generated peptide
cctatactggcgcgcatcca

SEQ ID NO: 1609 - DNA, 20 bp, Artificial
  Synthetically generated peptide
ctatactggcgcgcatccat

SEQ ID NO: 1610 - DNA, 20 bp, Artificial
  Synthetically generated peptide
tatactggcgcgcatccatt

SEQ ID NO: 1611 - DNA, 20 bp, Artificial
  Synthetically generated peptide
atactggcgcgcatccattt

SEQ ID NO: 1612 - DNA, 20 bp, Artificial
  Synthetically generated peptide
tactggcgcgcatccattta

SEQ ID NO: 1613 - DNA, 20 bp, Artificial
  Synthetically generated peptide
actggcgcgcatccatttac

SEQ ID NO: 1614 - DNA, 20 bp, Artificial
  Synthetically generated peptide
ctggcgcgcatccatttact

SEQ ID NO: 1615 - DNA, 20 bp, Artificial
  Synthetically generated peptide
tggcgcgcatccatttacta

SEQ ID NO: 1616 - DNA, 20 bp, Artificial
  Synthetically generated peptide
ggcgcgcatccatttactat

SEQ ID NO: 1617 - DNA, 20 bp, Artificial
  Synthetically generated peptide
gcgcgcatccatttactatc

SEQ ID NO: 1618 - DNA, 20 bp, Artificial
  Synthetically generated peptide
cgcgcatccatttactatca

SEQ ID NO: 1619 - DNA, 20 bp, Artificial
  Synthetically generated peptide
agcaccccgccaccctcagg

SEQ ID NO: 1620 - DNA, 20 bp, Artificial
  Synthetically generated peptide
gagcaccccgccaccctcag

SEQ ID NO: 1621 - DNA, 20 bp, Artificial
  Synthetically generated peptide
agagcaccccgccaccctca

SEQ ID NO: 1622 - DNA, 20 bp, Artificial
  Synthetically generated peptide
aagagcaccccgccaccctc

SEQ ID NO: 1623 - DNA, 20 bp, Artificial
  Synthetically generated peptide
gaagagcaccccgccaccct

SEQ ID NO: 1624 - DNA, 20 bp, Artificial
  Synthetically generated peptide
cgaagagcaccccgccaccc

SEQ ID NO: 1625 - DNA, 20 bp, Artificial
  Synthetically generated peptide
gcgaagagcaccccgccacc

SEQ ID NO: 1626 - DNA, 20 bp, Artificial
  Synthetically generated peptide
tgcgaagagcaccccgccac

SEQ ID NO: 1627 - DNA, 20 bp, Artificial
  Synthetically generated peptide
ctgcgaagagcaccccgcca

SEQ ID NO: 1628 - DNA, 20 bp, Artificial
  Synthetically generated peptide
gctgcgaagagcaccccgcc

SEQ ID NO: 1629 - DNA, 20 bp, Artificial
  Synthetically generated peptide
agctgcgaagagcaccccgc

SEQ ID NO: 1630 - DNA, 20 bp, Artificial
  Synthetically generated peptide
aagctgcgaagagcaccccg

SEQ ID NO: 1631 - DNA, 20 bp, Artificial
  Synthetically generated peptide
gaagctgcgaagagcacccc

SEQ ID NO: 1632 - DNA, 20 bp, Artificial
  Synthetically generated peptide
agaagctgcgaagagcaccc

SEQ ID NO: 1633 - DNA, 25 bp, Artificial
  Synthetically generated peptide
gagccgccgccaccttcgccgccgc

SEQ ID NO: 1634 - DNA, 20 bp, Artificial
  Synthetically generated peptide
agccgccgccaccttcgccg

SEQ ID NO: 1635 - DNA, 20 bp, Artificial
  Synthetically generated peptide
gccgccgccaccttcgccgc

SEQ ID NO: 1636 - DNA, 20 bp, Artificial
  Synthetically generated peptide
ccgccgccaccttcgccgcc

SEQ ID NO: 1637 - DNA, 20 bp, Artificial
  Synthetically generated peptide
cgccgccaccttcgccgccg

SEQ ID NO: 1638 - DNA, 20 bp, Artificial
  Synthetically generated peptide
gccgccaccttcgccgccgc

SEQ ID NO: 1639 - DNA, 20 bp, Artificial
  Synthetically generated peptide
ccgccaccttcgccgccgcc

SEQ ID NO: 1640 - DNA, 20 bp, Artificial
  Synthetically generated peptide
cgccaccttcgccgccgcca

SEQ ID NO: 1641 - DNA, 20 bp, Artificial
  Synthetically generated peptide
gccaccttcgccgccgccac

SEQ ID NO: 1642 - DNA, 20 bp, Artificial
  Synthetically generated peptide
ccaccttcgccgccgccact

SEQ ID NO: 1643 - DNA, 20 bp, Artificial
  Synthetically generated peptide
caccttcgccgccgccactg

SEQ ID NO: 1644 - DNA, 20 bp, Artificial
  Synthetically generated peptide
accttcgccgccgccactgc

SEQ ID NO: 1645 - DNA, 20 bp, Artificial
  Synthetically generated peptide
ccttcgccgccgccactgcc

SEQ ID NO: 1646 - DNA, 20 bp, Artificial
  Synthetically generated peptide
cttcgccgccgccactgccg

SEQ ID NO: 1647 - DNA, 20 bp, Artificial
  Synthetically generated peptide
ttcgccgccgccactgccgc

SEQ ID NO: 1648 - DNA, 20 bp, Artificial
  Synthetically generated peptide
tcgccgccgccactgccgcc

SEQ ID NO: 1649 - DNA, 20 bp, Artificial
  Synthetically generated peptide
cgccgccgccactgccgccg

SEQ ID NO: 1650 - DNA, 20 bp, Artificial
  Synthetically generated peptide
gccgccgccactgccgccgc

SEQ ID NO: 1651 - DNA, 20 bp, Artificial
  Synthetically generated peptide
ccgccgccactgccgccgcc

SEQ ID NO: 1652 - DNA, 20 bp, Artificial
  Synthetically generated peptide
cgccgccactgccgccgccg

SEQ ID NO: 1653 - DNA, 20 bp, Artificial
  Synthetically generated peptide
gccgccactgccgccgccgc

SEQ ID NO: 1654 - DNA, 20 bp, Artificial
  Synthetically generated peptide
ccgccactgccgccgccgct

SEQ ID NO: 1655 - DNA, 20 bp, Artificial
  Synthetically generated peptide
cgccactgccgccgccgctg

SEQ ID NO: 1656 - DNA, 20 bp, Artificial
  Synthetically generated peptide
gccactgccgccgccgctgc

SEQ ID NO: 1657 - DNA, 20 bp, Artificial
  Synthetically generated peptide
ccactgccgccgccgctgct

SEQ ID NO: 1658 - DNA, 20 bp, Artificial
  Synthetically generated peptide
cactgccgccgccgctgctg

SEQ ID NO: 1659 - DNA, 20 bp, Artificial
  Synthetically generated peptide
actgccgccgccgctgctgc

SEQ ID NO: 1660 - DNA, 20 bp, Artificial
  Synthetically generated peptide
ctgccgccgccgctgctgcc

SEQ ID NO: 1661 - DNA, 20 bp, Artificial
  Synthetically generated peptide
tgccgccgccgctgctgcct

SEQ ID NO: 1662 - DNA, 20 bp, Artificial
  Synthetically generated peptide
gccgccgccgctgctgcctc

SEQ ID NO: 1663 - DNA, 20 bp, Artificial
  Synthetically generated peptide
ccgccgccgctgctgcctcc

SEQ ID NO: 1664 - DNA, 20 bp, Artificial
  Synthetically generated peptide
cgccgccgctgctgcctccg

SEQ ID NO: 1665 - DNA, 20 bp, Artificial
  Synthetically generated peptide
gccgccgctgctgcctccgc

SEQ ID NO: 1666 - DNA, 20 bp, Artificial
  Synthetically generated peptide
ccgccgctgctgcctccgcc

SEQ ID NO: 1667 - DNA, 20 bp, Artificial
  Synthetically generated peptide
cgccgctgctgcctccgccg

SEQ ID NO: 1668 - DNA, 20 bp, Artificial
  Synthetically generated peptide
gccgctgctgcctccgccgc

SEQ ID NO: 1669 - DNA, 20 bp, Artificial
  Synthetically generated peptide
ccgctgctgcctccgccgcc

SEQ ID NO: 1670 - DNA, 20 bp, Artificial
  Synthetically generated peptide
cgctgctgcctccgccgccg

SEQ ID NO: 1671 - DNA, 20 bp, Artificial
  Synthetically generated peptide
gctgctgcctccgccgccgc

SEQ ID NO: 1672 - DNA, 20 bp, Artificial
  Synthetically generated peptide
ctgctgcctccgccgccgcg

SEQ ID NO: 1673 - DNA, 20 bp, Artificial
  Synthetically generated peptide
tgctgcctccgccgccgcgg

SEQ ID NO: 1674 - DNA, 20 bp, Artificial
  Synthetically generated peptide
gctgcctccgccgccgcggc

SEQ ID NO: 1675 - DNA, 20 bp, Artificial
  Synthetically generated peptide
ctgcctccgccgccgcggcc

SEQ ID NO: 1676 - DNA, 20 bp, Artificial
  Synthetically generated peptide
cgagccgccgccaccttcgc

SEQ ID NO: 1677 - DNA, 20 bp, Artificial
  Synthetically generated peptide
ccgagccgccgccaccttcg

SEQ ID NO: 1678 - DNA, 20 bp, Artificial
  Synthetically generated peptide
gccgagccgccgccaccttc

SEQ ID NO: 1679 - DNA, 20 bp, Artificial
  Synthetically generated peptide
ggccgagccgccgccacctt

SEQ ID NO: 1680 - DNA, 20 bp, Artificial
  Synthetically generated peptide
tggccgagccgccgccacct

SEQ ID NO: 1681 - DNA, 20 bp, Artificial
  Synthetically generated peptide
ctggccgagccgccgccacc

SEQ ID NO: 1682 - DNA, 20 bp, Artificial
  Synthetically generated peptide
actggccgagccgccgccac

SEQ ID NO: 1683 - DNA, 20 bp, Artificial
  Synthetically generated peptide
tactggccgagccgccgcca

SEQ ID NO: 1684 - DNA, 20 bp, Artificial
  Synthetically generated peptide
gtactggccgagccgccgcc

SEQ ID NO: 1685 - DNA, 20 bp, Artificial
  Synthetically generated peptide
agtactggccgagccgccgc

SEQ ID NO: 1686 - DNA, 20 bp, Artificial
  Synthetically generated peptide
gagtactggccgagccgccg

SEQ ID NO: 1687 - DNA, 20 bp, Artificial
  Synthetically generated peptide
ggagtactggccgagccgcc

SEQ ID NO: 1688 - DNA, 20 bp, Artificial
  Synthetically generated peptide
gggagtactggccgagccgc

SEQ ID NO: 1689 - DNA, 20 bp, Artificial
  Synthetically generated peptide
cgggagtactggccgagccg

SEQ ID NO: 1690 - DNA, 20 bp, Artificial
  Synthetically generated peptide
ccgggagtactggccgagcc

SEQ ID NO: 1691 - DNA, 20 bp, Artificial
  Synthetically generated peptide
gccgggagtactggccgagc

SEQ ID NO: 1692 - DNA, 20 bp, Artificial
  Synthetically generated peptide
ggccgggagtactggccgag

SEQ ID NO: 1693 - DNA, 20 bp, Artificial
  Synthetically generated peptide
gggccgggagtactggccga

SEQ ID NO: 1694 - DNA, 20 bp, Artificial
  Synthetically generated peptide
ggggccgggagtactggccg

SEQ ID NO: 1695 - DNA, 20 bp, Artificial
  Synthetically generated peptide
gggggccgggagtactggcc

SEQ ID NO: 1696 - DNA, 20 bp, Artificial
  Synthetically generated peptide
cgggggccgggagtactggc

SEQ ID NO: 1697 - DNA, 21 bp, Artificial
  Synthetically generated peptide
cggcatagttccccgccttac

SEQ ID NO: 1698 - DNA, 20 bp, Artificial
  Synthetically generated peptide
ggcatagttccccgccttac

SEQ ID NO: 1699 - DNA, 20 bp, Artificial
  Synthetically generated peptide
gcatagttccccgccttact

SEQ ID NO: 1700 - DNA, 20 bp, Artificial
  Synthetically generated peptide
catagttccccgccttactc

SEQ ID NO: 1701 - DNA, 20 bp, Artificial
  Synthetically generated peptide
atagttccccgccttactct

SEQ ID NO: 1702 - DNA, 20 bp, Artificial
  Synthetically generated peptide
tagttccccgccttactctg

SEQ ID NO: 1703 - DNA, 20 bp, Artificial
  Synthetically generated peptide
agttccccgccttactctgc

SEQ ID NO: 1704 - DNA, 20 bp, Artificial
  Synthetically generated peptide
gttccccgccttactctgct

SEQ ID NO: 1705 - DNA, 20 bp, Artificial
  Synthetically generated peptide
ttccccgccttactctgctc

SEQ ID NO: 1706 - DNA, 20 bp, Artificial
  Synthetically generated peptide
tccccgccttactctgctct

SEQ ID NO: 1707 - DNA, 20 bp, Artificial
  Synthetically generated peptide
ccccgccttactctgctcta

SEQ ID NO: 1708 - DNA, 20 bp, Artificial
  Synthetically generated peptide
cccgccttactctgctctac

SEQ ID NO: 1709 - DNA, 20 bp, Artificial
  Synthetically generated peptide
ccgccttactctgctctacc

SEQ ID NO: 1710 - DNA, 20 bp, Artificial
  Synthetically generated peptide
cgccttactctgctctacct

SEQ ID NO: 1711 - DNA, 20 bp, Artificial
  Synthetically generated peptide
acggcatagttccccgcctt

SEQ ID NO: 1712 - DNA, 20 bp, Artificial
  Synthetically generated peptide
cacggcatagttccccgcct

SEQ ID NO: 1713 - DNA, 20 bp, Artificial
  Synthetically generated peptide
tcacggcatagttccccgcc

SEQ ID NO: 1714 - DNA, 20 bp, Artificial
  Synthetically generated peptide
gtcacggcatagttccccgc

SEQ ID NO: 1715 - DNA, 20 bp, Artificial
  Synthetically generated peptide
ggtcacggcatagttccccg

SEQ ID NO: 1716 - DNA, 20 bp, Artificial
  Synthetically generated peptide
cggtcacggcatagttcccc

SEQ ID NO: 1717 - DNA, 20 bp, Artificial
  Synthetically generated peptide
acggtcacggcatagttccc

SEQ ID NO: 1718 - DNA, 20 bp, Artificial
  Synthetically generated peptide
cacggtcacggcatagttcc

SEQ ID NO: 1719 - DNA, 20 bp, Artificial
  Synthetically generated peptide
acacggtcacggcatagttc

SEQ ID NO: 1720 - DNA, 20 bp, Artificial
  Synthetically generated peptide
cacacggtcacggcatagtt

SEQ ID NO: 1721 - DNA, 20 bp, Artificial
  Synthetically generated peptide
acacacggtcacggcatagt

SEQ ID NO: 1722 - DNA, 20 bp, Artificial
  Synthetically generated peptide
cacacacggtcacggcatag

SEQ ID NO: 1723 - DNA, 20 bp, Artificial
  Synthetically generated peptide
tcacacacggtcacggcata

SEQ ID NO: 1724 - DNA, 20 bp, Artificial
  Synthetically generated peptide
atcacacacggtcacggcat

SEQ ID NO: 1725 - DNA, 20 bp, Artificial
  Synthetically generated peptide
tatcacacacggtcacggca

SEQ ID NO: 1726 - DNA, 20 bp, Artificial
  Synthetically generated peptide
gtatcacacacggtcacggc

SEQ ID NO: 1727 - DNA, 20 bp, Artificial
  Synthetically generated peptide
tgtatcacacacggtcacgg

SEQ ID NO: 1728 - DNA, 20 bp, Artificial
  Synthetically generated peptide
ttgtatcacacacggtcacg

SEQ ID NO: 1729 - DNA, 20 bp, Artificial
  Synthetically generated peptide
attgtatcacacacggtcac

SEQ ID NO: 1730 - DNA, 25 bp, Artificial
  Synthetically generated peptide
cggcccgagcctccgtgacgagtgc

SEQ ID NO: 1731 - DNA, 20 bp, Artificial
  Synthetically generated peptide
ggcccgagcctccgtgacga

SEQ ID NO: 1732 - DNA, 20 bp, Artificial
  Synthetically generated peptide
gcccgagcctccgtgacgag

SEQ ID NO: 1733 - DNA, 20 bp, Artificial
  Synthetically generated peptide
cccgagcctccgtgacgagt

SEQ ID NO: 1734 - DNA, 20 bp, Artificial
  Synthetically generated peptide
ccgagcctccgtgacgagtg

SEQ ID NO: 1735 - DNA, 20 bp, Artificial
  Synthetically generated peptide
cgagcctccgtgacgagtgc

SEQ ID NO: 1736 - DNA, 20 bp, Artificial
  Synthetically generated peptide
gagcctccgtgacgagtgcc

SEQ ID NO: 1737 - DNA, 20 bp, Artificial
  Synthetically generated peptide
agcctccgtgacgagtgcca

SEQ ID NO: 1738 - DNA, 20 bp, Artificial
  Synthetically generated peptide
gcctccgtgacgagtgccac

SEQ ID NO: 1739 - DNA, 20 bp, Artificial
  Synthetically generated peptide
cctccgtgacgagtgccacc

SEQ ID NO: 1740 - DNA, 20 bp, Artificial
  Synthetically generated peptide
ctccgtgacgagtgccaccc

SEQ ID NO: 1741 - DNA, 20 bp, Artificial
  Synthetically generated peptide
tccgtgacgagtgccacccc

SEQ ID NO: 1742 - DNA, 20 bp, Artificial
  Synthetically generated peptide
ccgtgacgagtgccaccccc

SEQ ID NO: 1743 - DNA, 20 bp, Artificial
  Synthetically generated peptide
cgtgacgagtgccaccccct

SEQ ID NO: 1744 - DNA, 20 bp, Artificial
  Synthetically generated peptide
gtgacgagtgccaccccctg

SEQ ID NO: 1745 - DNA, 20 bp, Artificial
  Synthetically generated peptide
tgacgagtgccaccccctgc

SEQ ID NO: 1746 - DNA, 20 bp, Artificial
  Synthetically generated peptide
gacgagtgccaccccctgct

SEQ ID NO: 1747 - DNA, 20 bp, Artificial
  Synthetically generated peptide
acgagtgccaccccctgctc

SEQ ID NO: 1748 - DNA, 20 bp, Artificial
  Synthetically generated peptide
cgagtgccaccccctgctcc

SEQ ID NO: 1749 - DNA, 20 bp, Artificial
  Synthetically generated peptide
gcggcccgagcctccgtgac

SEQ ID NO: 1750 - DNA, 20 bp, Artificial
  Synthetically generated peptide
tgcggcccgagcctccgtga

SEQ ID NO: 1751 - DNA, 20 bp, Artificial
  Synthetically generated peptide
atgcggcccgagcctccgtg

SEQ ID NO: 1752 - DNA, 20 bp, Artificial
  Synthetically generated peptide
tatgcggcccgagcctccgt

SEQ ID NO: 1753 - DNA, 20 bp, Artificial
  Synthetically generated peptide
ctatgcggcccgagcctccg

SEQ ID NO: 1754 - DNA, 20 bp, Artificial
  Synthetically generated peptide
cctatgcggcccgagcctcc

SEQ ID NO: 1755 - DNA, 20 bp, Artificial
  Synthetically generated peptide
tcctatgcggcccgagcctc

SEQ ID NO: 1756 - DNA, 20 bp, Artificial
  Synthetically generated peptide
ctcctatgcggcccgagcct

SEQ ID NO: 1757 - DNA, 20 bp, Artificial
  Synthetically generated peptide
gctcctatgcggcccgagcc

SEQ ID NO: 1758 - DNA, 20 bp, Artificial
  Synthetically generated peptide
ggctcctatgcggcccgagc

SEQ ID NO: 1759 - DNA, 20 bp, Artificial
  Synthetically generated peptide
gggctcctatgcggcccgag

SEQ ID NO: 1760 - DNA, 20 bp, Artificial
  Synthetically generated peptide
tgggctcctatgcggcccga

SEQ ID NO: 1761 - DNA, 20 bp, Artificial
  Synthetically generated peptide
atgggctcctatgcggcccg

SEQ ID NO: 1762 - DNA, 20 bp, Artificial
  Synthetically generated peptide
catgggctcctatgcggccc

SEQ ID NO: 1763 - DNA, 20 bp, Artificial
  Synthetically generated peptide
ccatgggctcctatgcggcc

SEQ ID NO: 1764 - DNA, 20 bp, Artificial
  Synthetically generated peptide
tccatgggctcctatgcggc

SEQ ID NO: 1765 - DNA, 20 bp, Artificial
  Synthetically generated peptide
ctccatgggctcctatgcgg

SEQ ID NO: 1766 - DNA, 20 bp, Artificial
  Synthetically generated peptide
cctccatgggctcctatgcg

SEQ ID NO: 1767 - DNA, 25 bp, Artificial
  Synthetically generated peptide
ctgggaggggatccctcaccgagag

SEQ ID NO: 1768 - DNA, 20 bp, Artificial
  Synthetically generated peptide
tgggaggggatccctcaccg

SEQ ID NO: 1769 - DNA, 20 bp, Artificial
  Synthetically generated peptide
gggaggggatccctcaccga

SEQ ID NO: 1770 - DNA, 20 bp, Artificial
  Synthetically generated peptide
ggaggggatccctcaccgag

SEQ ID NO: 1771 - DNA, 20 bp, Artificial
  Synthetically generated peptide
gaggggatccctcaccgaga

SEQ ID NO: 1772 - DNA, 20 bp, Artificial
  Synthetically generated peptide
aggggatccctcaccgagag

SEQ ID NO: 1773 - DNA, 20 bp, Artificial
  Synthetically generated peptide
ggggatccctcaccgagagt

SEQ ID NO: 1774 - DNA, 20 bp, Artificial
  Synthetically generated peptide
gggatccctcaccgagagtt

SEQ ID NO: 1775 - DNA, 20 bp, Artificial
  Synthetically generated peptide
ggatccctcaccgagagtta

SEQ ID NO: 1776 - DNA, 20 bp, Artificial
  Synthetically generated peptide
gatccctcaccgagagttag

SEQ ID NO: 1777 - DNA, 20 bp, Artificial
  Synthetically generated peptide
atccctcaccgagagttaga

SEQ ID NO: 1778 - DNA, 20 bp, Artificial
  Synthetically generated peptide
tccctcaccgagagttagaa

SEQ ID NO: 1779 - DNA, 20 bp, Artificial
  Synthetically generated peptide
ccctcaccgagagttagaaa

SEQ ID NO: 1780 - DNA, 20 bp, Artificial
  Synthetically generated peptide
cctcaccgagagttagaaaa

SEQ ID NO: 1781 - DNA, 20 bp, Artificial
  Synthetically generated peptide
ctcaccgagagttagaaaag

SEQ ID NO: 1782 - DNA, 20 bp, Artificial
  Synthetically generated peptide
tcaccgagagttagaaaagc

SEQ ID NO: 1783 - DNA, 20 bp, Artificial
  Synthetically generated peptide
caccgagagttagaaaagct

SEQ ID NO: 1784 - DNA, 22 bp, Artificial
  Synthetically generated peptide
aaccgccgtagcctccactgcg

SEQ ID NO: 1785 - DNA, 20 bp, Artificial
  Synthetically generated peptide
accgccgtagcctccactgc

SEQ ID NO: 1786 - DNA, 20 bp, Artificial
  Synthetically generated peptide
ccgccgtagcctccactgcg

SEQ ID NO: 1787 - DNA, 20 bp, Artificial
  Synthetically generated peptide
cgccgtagcctccactgcgt

SEQ ID NO: 1788 - DNA, 20 bp, Artificial
  Synthetically generated peptide
gccgtagcctccactgcgta

SEQ ID NO: 1789 - DNA, 20 bp, Artificial
  Synthetically generated peptide
ccgtagcctccactgcgtaa

SEQ ID NO: 1790 - DNA, 20 bp, Artificial
  Synthetically generated peptide
cgtagcctccactgcgtaac

SEQ ID NO: 1791 - DNA, 20 bp, Artificial
  Synthetically generated peptide
gtagcctccactgcgtaact

SEQ ID NO: 1792 - DNA, 20 bp, Artificial
  Synthetically generated peptide
tagcctccactgcgtaacta

SEQ ID NO: 1793 - DNA, 20 bp, Artificial
  Synthetically generated peptide
agcctccactgcgtaactac

SEQ ID NO: 1794 - DNA, 20 bp, Artificial
  Synthetically generated peptide
gcctccactgcgtaactacc

SEQ ID NO: 1795 - DNA, 20 bp, Artificial
  Synthetically generated peptide
cctccactgcgtaactaccg

SEQ ID NO: 1796 - DNA, 20 bp, Artificial
  Synthetically generated peptide
ctccactgcgtaactaccgc

SEQ ID NO: 1797 - DNA, 20 bp, Artificial
  Synthetically generated peptide
tccactgcgtaactaccgcc

SEQ ID NO: 1798 - DNA, 20 bp, Artificial
  Synthetically generated peptide
ccactgcgtaactaccgccc

SEQ ID NO: 1799 - DNA, 20 bp, Artificial
  Synthetically generated peptide
cactgcgtaactaccgcccc

SEQ ID NO: 1800 - DNA, 20 bp, Artificial
  Synthetically generated peptide
actgcgtaactaccgcccct

SEQ ID NO: 1801 - DNA, 20 bp, Artificial
  Synthetically generated peptide
ctgcgtaactaccgcccctg

SEQ ID NO: 1802 - DNA, 20 bp, Artificial
  Synthetically generated peptide
tgcgtaactaccgcccctgc

SEQ ID NO: 1803 - DNA, 20 bp, Artificial
  Synthetically generated peptide
gcgtaactaccgcccctgcc

SEQ ID NO: 1804 - DNA, 20 bp, Artificial
  Synthetically generated peptide
cgtaactaccgcccctgcct

SEQ ID NO: 1805 - DNA, 20 bp, Artificial
  Synthetically generated peptide
gtaactaccgcccctgcctc

SEQ ID NO: 1806 - DNA, 20 bp, Artificial
  Synthetically generated peptide
taactaccgcccctgcctct

SEQ ID NO: 1807 - DNA, 20 bp, Artificial
  Synthetically generated peptide
aactaccgcccctgcctctg

SEQ ID NO: 1808 - DNA, 20 bp, Artificial
  Synthetically generated peptide
actaccgcccctgcctctgg

SEQ ID NO: 1809 - DNA, 20 bp, Artificial
  Synthetically generated peptide
ctaccgcccctgcctctggg

SEQ ID NO: 1810 - DNA, 20 bp, Artificial
  Synthetically generated peptide
taccgcccctgcctctggga

SEQ ID NO: 1811 - DNA, 20 bp, Artificial
  Synthetically generated peptide
accgcccctgcctctgggaa

SEQ ID NO: 1812 - DNA, 20 bp, Artificial
  Synthetically generated peptide
ccgcccctgcctctgggaat

SEQ ID NO: 1813 - DNA, 20 bp, Artificial
  Synthetically generated peptide
cgcccctgcctctgggaatt

SEQ ID NO: 1814 - DNA, 20 bp, Artificial
  Synthetically generated peptide
caaccgccgtagcctccact

SEQ ID NO: 1815 - DNA, 20 bp, Artificial
  Synthetically generated peptide
gcaaccgccgtagcctccac

SEQ ID NO: 1816 - DNA, 20 bp, Artificial
  Synthetically generated peptide
cgcaaccgccgtagcctcca

SEQ ID NO: 1817 - DNA, 20 bp, Artificial
  Synthetically generated peptide
acgcaaccgccgtagcctcc

SEQ ID NO: 1818 - DNA, 20 bp, Artificial
  Synthetically generated peptide
gacgcaaccgccgtagcctc

SEQ ID NO: 1819 - DNA, 20 bp, Artificial
  Synthetically generated peptide
agacgcaaccgccgtagcct

SEQ ID NO: 1820 - DNA, 20 bp, Artificial
  Synthetically generated peptide
aagacgcaaccgccgtagcc

SEQ ID NO: 1821 - DNA, 20 bp, Artificial
  Synthetically generated peptide
taagacgcaaccgccgtagc

SEQ ID NO: 1822 - DNA, 20 bp, Artificial
  Synthetically generated peptide
gtaagacgcaaccgccgtag

SEQ ID NO: 1823 - DNA, 20 bp, Artificial
  Synthetically generated peptide
cgtaagacgcaaccgccgta

SEQ ID NO: 1824 - DNA, 20 bp, Artificial
  Synthetically generated peptide
acgtaagacgcaaccgccgt

SEQ ID NO: 1825 - DNA, 20 bp, Artificial
  Synthetically generated peptide
gacgtaagacgcaaccgccg

SEQ ID NO: 1826 - DNA, 20 bp, Artificial
  Synthetically generated peptide
tgacgtaagacgcaaccgcc

SEQ ID NO: 1827 - DNA, 20 bp, Artificial
  Synthetically generated peptide
atgacgtaagacgcaaccgc

SEQ ID NO: 1828 - DNA, 20 bp, Artificial
  Synthetically generated peptide
gatgacgtaagacgcaaccg

SEQ ID NO: 1829 - DNA, 20 bp, Artificial
  Synthetically generated peptide
cgatgacgtaagacgcaacc

SEQ ID NO: 1830 - DNA, 20 bp, Artificial
  Synthetically generated peptide
tcgatgacgtaagacgcaac

SEQ ID NO: 1831 - DNA, 20 bp, Artificial
  Synthetically generated peptide
ttcgatgacgtaagacgcaa

SEQ ID NO: 1832 - DNA, 20 bp, Artificial
  Synthetically generated peptide
gttcgatgacgtaagacgca

SEQ ID NO: 1833 - DNA, 20 bp, Artificial
  Synthetically generated peptide
agttcgatgacgtaagacgc

SEQ ID NO: 1834 - DNA, 20 bp, Artificial
  Synthetically generated peptide
cagttcgatgacgtaagacg

SEQ ID NO: 1835 - DNA, 20 bp, Artificial
  Synthetically generated peptide
gcagttcgatgacgtaagac

SEQ ID NO: 1836 - DNA, 20 bp, Artificial
  Synthetically generated peptide
cgcagttcgatgacgtaaga

SEQ ID NO: 1837 - DNA, 20 bp, Artificial
  Synthetically generated peptide
ccgcagttcgatgacgtaag

SEQ ID NO: 1838 - DNA, 20 bp, Artificial
  Synthetically generated peptide
gccgcagttcgatgacgtaa

SEQ ID NO: 1839 - DNA, 20 bp, Artificial
  Synthetically generated peptide
ggccgcagttcgatgacgta

SEQ ID NO: 1840 - DNA, 20 bp, Artificial
  Synthetically generated peptide
tggccgcagttcgatgacgt

SEQ ID NO: 1841 - DNA, 20 bp, Artificial
  Synthetically generated peptide
atggccgcagttcgatgacg

SEQ ID NO: 1842 - DNA, 20 bp, Artificial
  Synthetically generated peptide
aatggccgcagttcgatgac

SEQ ID NO: 1843 - DNA, 20 bp, Artificial
  Synthetically generated peptide
aaatggccgcagttcgatga

SEQ ID NO: 1844 - DNA, 20 bp, Artificial
  Synthetically generated peptide
gaaatggccgcagttcgatg

SEQ ID NO: 1845 - DNA, 20 bp, Artificial
  Synthetically generated peptide
cgaaatggccgcagttcgat

SEQ ID NO: 1846 - DNA, 20 bp, Artificial
  Synthetically generated peptide
tcgaaatggccgcagttcga

SEQ ID NO: 1847 - DNA, 20 bp, Artificial
  Synthetically generated peptide
ttcgaaatggccgcagttcg

SEQ ID NO: 1848 - DNA, 20 bp, Artificial
  Synthetically generated peptide
gttcgaaatggccgcagttc

SEQ ID NO: 1849 - DNA, 20 bp, Artificial
  Synthetically generated peptide
ggttcgaaatggccgcagtt

SEQ ID NO: 1850 - DNA, 20 bp, Artificial
  Synthetically generated peptide
gggttcgaaatggccgcagt

SEQ ID NO: 1851 - DNA, 20 bp, Artificial
  Synthetically generated peptide
cgggttcgaaatggccgcag

SEQ ID NO: 1852 - DNA, 20 bp, Artificial
  Synthetically generated peptide
gcgggttcgaaatggccgca

SEQ ID NO: 1853 - DNA, 20 bp, Artificial
  Synthetically generated peptide
tgcgggttcgaaatggccgc

SEQ ID NO: 1854 - DNA, 20 bp, Artificial
  Synthetically generated peptide
ttgcgggttcgaaatggccg

SEQ ID NO: 1855 - DNA, 20 bp, Artificial
  Synthetically generated peptide
attgcgggttcgaaatggcc

SEQ ID NO: 1856 - DNA, 20 bp, Artificial
  Synthetically generated peptide
cattgcgggttcgaaatggc

SEQ ID NO: 1857 - DNA, 20 bp, Artificial
  Synthetically generated peptide
ccattgcgggttcgaaatgg

SEQ ID NO: 1858 - DNA, 20 bp, Artificial
  Synthetically generated peptide
tccattgcgggttcgaaatg

SEQ ID NO: 1859 - DNA, 20 bp, Artificial
  Synthetically generated peptide
ttccattgcgggttcgaaat

SEQ ID NO: 1860 - DNA, 20 bp, Artificial
  Synthetically generated peptide
cttccattgcgggttcgaaa

SEQ ID NO: 1861 - DNA, 20 bp, Artificial
  Synthetically generated peptide
tcttccattgcgggttcgaa

SEQ ID NO: 1862 - DNA, 20 bp, Artificial
  Synthetically generated peptide
ttcttccattgcgggttcga

SEQ ID NO: 1863 - DNA, 20 bp, Artificial
  Synthetically generated peptide
tttcttccattgcgggttcg

SEQ ID NO: 1864 - DNA, 20 bp, Artificial
  Synthetically generated peptide
ctttcttccattgcgggttc

SEQ ID NO: 1865 - DNA, 20 bp, Artificial
  Synthetically generated peptide
cctttcttccattgcgggtt

SEQ ID NO: 1866 - DNA, 20 bp, Artificial
  Synthetically generated peptide
ccctttcttccattgcgggt

SEQ ID NO: 1867 - DNA, 20 bp, Artificial
  Synthetically generated peptide
cccctttcttccattgcggg

SEQ ID NO: 1868 - DNA, 20 bp, Artificial
  Synthetically generated peptide
tcccctttcttccattgcgg

SEQ ID NO: 1869 - DNA, 20 bp, Artificial
  Synthetically generated peptide
ctcccctttcttccattgcg

SEQ ID NO: 1870 - DNA, 26 bp, Artificial
  Synthetically generated peptide
tggccgcagttcgatgacgtaagacg

SEQ ID NO: 1871 - DNA, 20 bp, Artificial
  Synthetically generated peptide
ggccgcagttcgatgacgta

SEQ ID NO: 1872 - DNA, 20 bp, Artificial
  Synthetically generated peptide
gccgcagttcgatgacgtaa

SEQ ID NO: 1873 - DNA, 20 bp, Artificial
  Synthetically generated peptide
ccgcagttcgatgacgtaag

SEQ ID NO: 1874 - DNA, 20 bp, Artificial
  Synthetically generated peptide
cgcagttcgatgacgtaaga

SEQ ID NO: 1875 - DNA, 20 bp, Artificial
  Synthetically generated peptide
gcagttcgatgacgtaagac

SEQ ID NO: 1876 - DNA, 20 bp, Artificial
  Synthetically generated peptide
cagttcgatgacgtaagacg

SEQ ID NO: 1877 - DNA, 20 bp, Artificial
  Synthetically generated peptide
agttcgatgacgtaagacgc

SEQ ID NO: 1878 - DNA, 20 bp, Artificial
  Synthetically generated peptide
gttcgatgacgtaagacgca

SEQ ID NO: 1879 - DNA, 20 bp, Artificial
  Synthetically generated peptide
ttcgatgacgtaagacgcaa

SEQ ID NO: 1880 - DNA, 20 bp, Artificial
  Synthetically generated peptide
tcgatgacgtaagacgcaac

SEQ ID NO: 1881 - DNA, 20 bp, Artificial
  Synthetically generated peptide
cgatgacgtaagacgcaacc

SEQ ID NO: 1882 - DNA, 20 bp, Artificial
  Synthetically generated peptide
gatgacgtaagacgcaaccg

SEQ ID NO: 1883 - DNA, 20 bp, Artificial
  Synthetically generated peptide
atgacgtaagacgcaaccgc

SEQ ID NO: 1884 - DNA, 20 bp, Artificial
  Synthetically generated peptide
tgacgtaagacgcaaccgcc

SEQ ID NO: 1885 - DNA, 20 bp, Artificial
  Synthetically generated peptide
gacgtaagacgcaaccgccg

SEQ ID NO: 1886 - DNA, 20 bp, Artificial
  Synthetically generated peptide
acgtaagacgcaaccgccgt

SEQ ID NO: 1887 - DNA, 20 bp, Artificial
  Synthetically generated peptide
cgtaagacgcaaccgccgta

SEQ ID NO: 1888 - DNA, 20 bp, Artificial
  Synthetically generated peptide
gtaagacgcaaccgccgtag

SEQ ID NO: 1889 - DNA, 20 bp, Artificial
  Synthetically generated peptide
taagacgcaaccgccgtagc

SEQ ID NO: 1890 - DNA, 20 bp, Artificial
  Synthetically generated peptide
aagacgcaaccgccgtagcc

SEQ ID NO: 1891 - DNA, 20 bp, Artificial
  Synthetically generated peptide
agacgcaaccgccgtagcct

SEQ ID NO: 1892 - DNA, 20 bp, Artificial
  Synthetically generated peptide
gacgcaaccgccgtagcctc

SEQ ID NO: 1893 - DNA, 20 bp, Artificial
  Synthetically generated peptide
acgcaaccgccgtagcctcc

SEQ ID NO: 1894 - DNA, 20 bp, Artificial
  Synthetically generated peptide
cgcaaccgccgtagcctcca

SEQ ID NO: 1895 - DNA, 20 bp, Artificial
  Synthetically generated peptide
gcaaccgccgtagcctccac

SEQ ID NO: 1896 - DNA, 20 bp, Artificial
  Synthetically generated peptide
caaccgccgtagcctccact

SEQ ID NO: 1897 - DNA, 20 bp, Artificial
  Synthetically generated peptide
aaccgccgtagcctccactg

SEQ ID NO: 1898 - DNA, 20 bp, Artificial
  Synthetically generated peptide
accgccgtagcctccactgc

SEQ ID NO: 1899 - DNA, 20 bp, Artificial
  Synthetically generated peptide
ccgccgtagcctccactgcg

SEQ ID NO: 1900 - DNA, 20 bp, Artificial
  Synthetically generated peptide
cgccgtagcctccactgcgt

SEQ ID NO: 1901 - DNA, 20 bp, Artificial
  Synthetically generated peptide
gccgtagcctccactgcgta

SEQ ID NO: 1902 - DNA, 20 bp, Artificial
  Synthetically generated peptide
ccgtagcctccactgcgtaa

SEQ ID NO: 1903 - DNA, 20 bp, Artificial
  Synthetically generated peptide
cgtagcctccactgcgtaac

SEQ ID NO: 1904 - DNA, 20 bp, Artificial
  Synthetically generated peptide
gtagcctccactgcgtaact

SEQ ID NO: 1905 - DNA, 20 bp, Artificial
  Synthetically generated peptide
tagcctccactgcgtaacta

SEQ ID NO: 1906 - DNA, 20 bp, Artificial
  Synthetically generated peptide
agcctccactgcgtaactac

SEQ ID NO: 1907 - DNA, 20 bp, Artificial
  Synthetically generated peptide
gcctccactgcgtaactacc

SEQ ID NO: 1908 - DNA, 20 bp, Artificial
  Synthetically generated peptide
cctccactgcgtaactaccg

SEQ ID NO: 1909 - DNA, 20 bp, Artificial
  Synthetically generated peptide
ctccactgcgtaactaccgc

SEQ ID NO: 1910 - DNA, 20 bp, Artificial
  Synthetically generated peptide
tccactgcgtaactaccgcc

SEQ ID NO: 1911 - DNA, 20 bp, Artificial
  Synthetically generated peptide
ccactgcgtaactaccgccc

SEQ ID NO: 1912 - DNA, 20 bp, Artificial
  Synthetically generated peptide
cactgcgtaactaccgcccc

SEQ ID NO: 1913 - DNA, 20 bp, Artificial
  Synthetically generated peptide
actgcgtaactaccgcccct

SEQ ID NO: 1914 - DNA, 20 bp, Artificial
  Synthetically generated peptide
ctgcgtaactaccgcccctg

SEQ ID NO: 1915 - DNA, 20 bp, Artificial
  Synthetically generated peptide
tgcgtaactaccgcccctgc

SEQ ID NO: 1916 - DNA, 20 bp, Artificial
  Synthetically generated peptide
gcgtaactaccgcccctgcc

SEQ ID NO: 1917 - DNA, 20 bp, Artificial
  Synthetically generated peptide
cgtaactaccgcccctgcct

SEQ ID NO: 1918 - DNA, 20 bp, Artificial
  Synthetically generated peptide
gtaactaccgcccctgcctc

SEQ ID NO: 1919 - DNA, 20 bp, Artificial
  Synthetically generated peptide
taactaccgcccctgcctct

SEQ ID NO: 1920 - DNA, 20 bp, Artificial
  Synthetically generated peptide
aactaccgcccctgcctctg

SEQ ID NO: 1921 - DNA, 20 bp, Artificial
  Synthetically generated peptide
actaccgcccctgcctctgg

SEQ ID NO: 1922 - DNA, 20 bp, Artificial
  Synthetically generated peptide
ctaccgcccctgcctctggg

SEQ ID NO: 1923 - DNA, 20 bp, Artificial
  Synthetically generated peptide
taccgcccctgcctctggga

SEQ ID NO: 1924 - DNA, 20 bp, Artificial
  Synthetically generated peptide
accgcccctgcctctgggaa

SEQ ID NO: 1925 - DNA, 20 bp, Artificial
  Synthetically generated peptide
ccgcccctgcctctgggaat

SEQ ID NO: 1926 - DNA, 20 bp, Artificial
  Synthetically generated peptide
cgcccctgcctctgggaatt

SEQ ID NO: 1927 - DNA, 20 bp, Artificial
  Synthetically generated peptide
atggccgcagttcgatgacg

SEQ ID NO: 1928 - DNA, 20 bp, Artificial
  Synthetically generated peptide
aatggccgcagttcgatgac

SEQ ID NO: 1929 - DNA, 20 bp, Artificial
  Synthetically generated peptide
aaatggccgcagttcgatga

SEQ ID NO: 1930 - DNA, 20 bp, Artificial
  Synthetically generated peptide
gaaatggccgcagttcgatg

SEQ ID NO: 1931 - DNA, 20 bp, Artificial
  Synthetically generated peptide
cgaaatggccgcagttcgat

SEQ ID NO: 1932 - DNA, 20 bp, Artificial
  Synthetically generated peptide
tcgaaatggccgcagttcga

SEQ ID NO: 1933 - DNA, 20 bp, Artificial
  Synthetically generated peptide
ttcgaaatggccgcagttcg

SEQ ID NO: 1934 - DNA, 20 bp, Artificial
  Synthetically generated peptide
gttcgaaatggccgcagttc

SEQ ID NO: 1935 - DNA, 20 bp, Artificial
  Synthetically generated peptide
ggttcgaaatggccgcagtt

SEQ ID NO: 1936 - DNA, 20 bp, Artificial
  Synthetically generated peptide
gggttcgaaatggccgcagt

SEQ ID NO: 1937 - DNA, 20 bp, Artificial
  Synthetically generated peptide
cgggttcgaaatggccgcag

SEQ ID NO: 1938 - DNA, 20 bp, Artificial
  Synthetically generated peptide
gcgggttcgaaatggccgca

SEQ ID NO: 1939 - DNA, 20 bp, Artificial
  Synthetically generated peptide
tgcgggttcgaaatggccgc

SEQ ID NO: 1940 - DNA, 20 bp, Artificial
  Synthetically generated peptide
ttgcgggttcgaaatggccg

SEQ ID NO: 1941 - DNA, 20 bp, Artificial
  Synthetically generated peptide
attgcgggttcgaaatggcc

SEQ ID NO: 1942 - DNA, 20 bp, Artificial
  Synthetically generated peptide
cattgcgggttcgaaatggc

SEQ ID NO: 1943 - DNA, 20 bp, Artificial
  Synthetically generated peptide
ccattgcgggttcgaaatgg

SEQ ID NO: 1944 - DNA, 20 bp, Artificial
  Synthetically generated peptide
tccattgcgggttcgaaatg

SEQ ID NO: 1945 - DNA, 20 bp, Artificial
  Synthetically generated peptide
ttccattgcgggttcgaaat

SEQ ID NO: 1946 - DNA, 20 bp, Artificial
  Synthetically generated peptide
cttccattgcgggttcgaaa

SEQ ID NO: 1947 - DNA, 20 bp, Artificial
  Synthetically generated peptide
tcttccattgcgggttcgaa

SEQ ID NO: 1948 - DNA, 20 bp, Artificial
  Synthetically generated peptide
ttcttccattgcgggttcga

SEQ ID NO: 1949 - DNA, 20 bp, Artificial
  Synthetically generated peptide
tttcttccattgcgggttcg

SEQ ID NO: 1950 - DNA, 20 bp, Artificial
  Synthetically generated peptide
ctttcttccattgcgggttc

SEQ ID NO: 1951 - DNA, 20 bp, Artificial
  Synthetically generated peptide
cctttcttccattgcgggtt

SEQ ID NO: 1952 - DNA, 20 bp, Artificial
  Synthetically generated peptide
ccctttcttccattgcgggt

SEQ ID NO: 1953 - DNA, 20 bp, Artificial
  Synthetically generated peptide
cccctttcttccattgcggg

SEQ ID NO: 1954 - DNA, 20 bp, Artificial
  Synthetically generated peptide
tcccctttcttccattgcgg

SEQ ID NO: 1955 - DNA, 20 bp, Artificial
  Synthetically generated peptide
ctcccctttcttccattgcg

SEQ ID NO: 1956 - DNA, 25 bp, Artificial
  Synthetically generated peptide
gagtcggtggtccaggaggggccgc

SEQ ID NO: 1957 - DNA, 29 bp, Artificial
  Synthetically generated peptide
ctgcggctgaggtgtcattcgtgactcag

SEQ ID NO: 1958 - DNA, 20 bp, Artificial
  Synthetically generated peptide
tgcggctgaggtgtcattcg

SEQ ID NO: 1959 - DNA, 20 bp, Artificial
  Synthetically generated peptide
gcggctgaggtgtcattcgt

SEQ ID NO: 1960 - DNA, 20 bp, Artificial
  Synthetically generated peptide
cggctgaggtgtcattcgtg

SEQ ID NO: 1961 - DNA, 20 bp, Artificial
  Synthetically generated peptide
ggctgaggtgtcattcgtga

SEQ ID NO: 1962 - DNA, 20 bp, Artificial
  Synthetically generated peptide
gctgaggtgtcattcgtgac

SEQ ID NO: 1963 - DNA, 20 bp, Artificial
  Synthetically generated peptide
ctgaggtgtcattcgtgact

SEQ ID NO: 1964 - DNA, 20 bp, Artificial
  Synthetically generated peptide
tgaggtgtcattcgtgactc

SEQ ID NO: 1965 - DNA, 20 bp, Artificial
  Synthetically generated peptide
gaggtgtcattcgtgactca

SEQ ID NO: 1966 - DNA, 20 bp, Artificial
  Synthetically generated peptide
aggtgtcattcgtgactcag

SEQ ID NO: 1967 - DNA, 20 bp, Artificial
  Synthetically generated peptide
ggtgtcattcgtgactcagt

SEQ ID NO: 1968 - DNA, 20 bp, Artificial
  Synthetically generated peptide
gtgtcattcgtgactcagtc

SEQ ID NO: 1969 - DNA, 20 bp, Artificial
  Synthetically generated peptide
tgtcattcgtgactcagtct

SEQ ID NO: 1970 - DNA, 20 bp, Artificial
  Synthetically generated peptide
gtcattcgtgactcagtctc

SEQ ID NO: 1971 - DNA, 20 bp, Artificial
  Synthetically generated peptide
tcattcgtgactcagtctcc

SEQ ID NO: 1972 - DNA, 20 bp, Artificial
  Synthetically generated peptide
cattcgtgactcagtctcct

SEQ ID NO: 1973 - DNA, 20 bp, Artificial
  Synthetically generated peptide
attcgtgactcagtctcctc

SEQ ID NO: 1974 - DNA, 20 bp, Artificial
  Synthetically generated peptide
ttcgtgactcagtctcctcc

SEQ ID NO: 1975 - DNA, 20 bp, Artificial
  Synthetically generated peptide
tcgtgactcagtctcctcct

SEQ ID NO: 1976 - DNA, 20 bp, Artificial
  Synthetically generated peptide
cgtgactcagtctcctcctc

SEQ ID NO: 1977 - DNA, 20 bp, Artificial
  Synthetically generated peptide
actgcggctgaggtgtcatt

SEQ ID NO: 1978 - DNA, 20 bp, Artificial
  Synthetically generated peptide
aactgcggctgaggtgtcat

SEQ ID NO: 1979 - DNA, 20 bp, Artificial
  Synthetically generated peptide
aaactgcggctgaggtgtca

SEQ ID NO: 1980 - DNA, 20 bp, Artificial
  Synthetically generated peptide
caaactgcggctgaggtgtc

SEQ ID NO: 1981 - DNA, 20 bp, Artificial
  Synthetically generated peptide
tcaaactgcggctgaggtgt

SEQ ID NO: 1982 - DNA, 20 bp, Artificial
  Synthetically generated peptide
gtcaaactgcggctgaggtg

SEQ ID NO: 1983 - DNA, 20 bp, Artificial
  Synthetically generated peptide
ggtcaaactgcggctgaggt

SEQ ID NO: 1984 - DNA, 20 bp, Artificial
  Synthetically generated peptide
aggtcaaactgcggctgagg

SEQ ID NO: 1985 - DNA, 20 bp, Artificial
  Synthetically generated peptide
gaggtcaaactgcggctgag

SEQ ID NO: 1986 - DNA, 20 bp, Artificial
  Synthetically generated peptide
ggaggtcaaactgcggctga

SEQ ID NO: 1987 - DNA, 20 bp, Artificial
  Synthetically generated peptide
tggaggtcaaactgcggctg

SEQ ID NO: 1988 - DNA, 20 bp, Artificial
  Synthetically generated peptide
ctggaggtcaaactgcggct

SEQ ID NO: 1989 - DNA, 20 bp, Artificial
  Synthetically generated peptide
cctggaggtcaaactgcggc

SEQ ID NO: 1990 - DNA, 20 bp, Artificial
  Synthetically generated peptide
tcctggaggtcaaactgcgg

SEQ ID NO: 1991 - DNA, 20 bp, Artificial
  Synthetically generated peptide
gtcctggaggtcaaactgcg

SEQ ID NO: 1992 - DNA, 24 bp, Artificial
  Synthetically generated peptide
gcgggcgggtgagacagaagcgcc

SEQ ID NO: 1993 - DNA, 22 bp, Artificial
  Synthetically generated peptide
cctcgcgagcgtgggtgcacgc

SEQ ID NO: 1994 - DNA, 20 bp, Artificial
  Synthetically generated peptide
ctcgcgagcgtgggtgcacg

SEQ ID NO: 1995 - DNA, 20 bp, Artificial
  Synthetically generated peptide
tcgcgagcgtgggtgcacgc

SEQ ID NO: 1996 - DNA, 20 bp, Artificial
  Synthetically generated peptide
cgcgagcgtgggtgcacgca

SEQ ID NO: 1997 - DNA, 20 bp, Artificial
  Synthetically generated peptide
gcgagcgtgggtgcacgcat

SEQ ID NO: 1998 - DNA, 20 bp, Artificial
  Synthetically generated peptide
cgagcgtgggtgcacgcatg

SEQ ID NO: 1999 - DNA, 20 bp, Artificial
  Synthetically generated peptide
gagcgtgggtgcacgcatgg

SEQ ID NO: 2000 - DNA, 20 bp, Artificial
  Synthetically generated peptide
agcgtgggtgcacgcatggg

SEQ ID NO: 2001 - DNA, 20 bp, Artificial
  Synthetically generated peptide
gcgtgggtgcacgcatgggc

SEQ ID NO: 2002 - DNA, 20 bp, Artificial
  Synthetically generated peptide
cgtgggtgcacgcatgggct

SEQ ID NO: 2003 - DNA, 20 bp, Artificial
  Synthetically generated peptide
gtgggtgcacgcatgggctg

SEQ ID NO: 2004 - DNA, 20 bp, Artificial
  Synthetically generated peptide
tgggtgcacgcatgggctgt

SEQ ID NO: 2005 - DNA, 20 bp, Artificial
  Synthetically generated peptide
gggtgcacgcatgggctgtg

SEQ ID NO: 2006 - DNA, 20 bp, Artificial
  Synthetically generated peptide
ggtgcacgcatgggctgtgc

SEQ ID NO: 2007 - DNA, 20 bp, Artificial
  Synthetically generated peptide
gtgcacgcatgggctgtgcc

SEQ ID NO: 2008 - DNA, 20 bp, Artificial
  Synthetically generated peptide
tgcacgcatgggctgtgcca

SEQ ID NO: 2009 - DNA, 20 bp, Artificial
  Synthetically generated peptide
gcacgcatgggctgtgccag

SEQ ID NO: 2010 - DNA, 20 bp, Artificial
  Synthetically generated peptide
cacgcatgggctgtgccagt

SEQ ID NO: 2011 - DNA, 20 bp, Artificial
  Synthetically generated peptide
acgcatgggctgtgccagtc

SEQ ID NO: 2012 - DNA, 20 bp, Artificial
  Synthetically generated peptide
cgcatgggctgtgccagtcc

SEQ ID NO: 2013 - DNA, 20 bp, Artificial
  Synthetically generated peptide
ccctcgcgagcgtgggtgca

SEQ ID NO: 2014 - DNA, 20 bp, Artificial
  Synthetically generated peptide
cccctcgcgagcgtgggtgc

SEQ ID NO: 2015 - DNA, 20 bp, Artificial
  Synthetically generated peptide
tcccctcgcgagcgtgggtg

SEQ ID NO: 2016 - DNA, 20 bp, Artificial
  Synthetically generated peptide
gtcccctcgcgagcgtgggt

SEQ ID NO: 2017 - DNA, 20 bp, Artificial
  Synthetically generated peptide
ggtcccctcgcgagcgtggg

SEQ ID NO: 2018 - DNA, 20 bp, Artificial
  Synthetically generated peptide
aggtcccctcgcgagcgtgg

SEQ ID NO: 2019 - DNA, 20 bp, Artificial
  Synthetically generated peptide
caggtcccctcgcgagcgtg

SEQ ID NO: 2020 - DNA, 20 bp, Artificial
  Synthetically generated peptide
gcaggtcccctcgcgagcgt

SEQ ID NO: 2021 - DNA, 20 bp, Artificial
  Synthetically generated peptide
agcaggtcccctcgcgagcg

SEQ ID NO: 2022 - DNA, 20 bp, Artificial
  Synthetically generated peptide
cagcaggtcccctcgcgagc

SEQ ID NO: 2023 - DNA, 20 bp, Artificial
  Synthetically generated peptide
gcagcaggtcccctcgcgag

SEQ ID NO: 2024 - DNA, 20 bp, Artificial
  Synthetically generated peptide
ggcagcaggtcccctcgcga

SEQ ID NO: 2025 - DNA, 20 bp, Artificial
  Synthetically generated peptide
aggcagcaggtcccctcgcg

SEQ ID NO: 2026 - DNA, 20 bp, Artificial
  Synthetically generated peptide
aaggcagcaggtcccctcgc

SEQ ID NO: 2027 - DNA, 20 bp, Artificial
  Synthetically generated peptide
aaaggcagcaggtcccctcg

SEQ ID NO: 2028 - DNA, 22 bp, Artificial
  Synthetically generated peptide
cgatgtctccctcgagatcaca

SEQ ID NO: 2029 - DNA, 20 bp, Artificial
  Synthetically generated peptide
gatgtctccctcgagatcac

SEQ ID NO: 2030 - DNA, 20 bp, Artificial
  Synthetically generated peptide
atgtctccctcgagatcaca

SEQ ID NO: 2031 - DNA, 20 bp, Artificial
  Synthetically generated peptide
tgtctccctcgagatcacac

SEQ ID NO: 2032 - DNA, 20 bp, Artificial
  Synthetically generated peptide
gtctccctcgagatcacaca

SEQ ID NO: 2033 - DNA, 20 bp, Artificial
  Synthetically generated peptide
tctccctcgagatcacacag

SEQ ID NO: 2034 - DNA, 20 bp, Artificial
  Synthetically generated peptide
ctccctcgagatcacacagg

SEQ ID NO: 2035 - DNA, 20 bp, Artificial
  Synthetically generated peptide
tccctcgagatcacacaggc

SEQ ID NO: 2036 - DNA, 20 bp, Artificial
  Synthetically generated peptide
ccctcgagatcacacaggcc

SEQ ID NO: 2037 - DNA, 20 bp, Artificial
  Synthetically generated peptide
cctcgagatcacacaggcct

SEQ ID NO: 2038 - DNA, 20 bp, Artificial
  Synthetically generated peptide
ctcgagatcacacaggcctt

SEQ ID NO: 2039 - DNA, 20 bp, Artificial
  Synthetically generated peptide
tcgagatcacacaggccttt

SEQ ID NO: 2040 - DNA, 20 bp, Artificial
  Synthetically generated peptide
cgagatcacacaggcctttc

SEQ ID NO: 2041 - DNA, 20 bp, Artificial
  Synthetically generated peptide
gcgatgtctccctcgagatc

SEQ ID NO: 2042 - DNA, 20 bp, Artificial
  Synthetically generated peptide
ggcgatgtctccctcgagat

SEQ ID NO: 2043 - DNA, 20 bp, Artificial
  Synthetically generated peptide
aggcgatgtctccctcgaga

SEQ ID NO: 2044 - DNA, 20 bp, Artificial
  Synthetically generated peptide
gaggcgatgtctccctcgag

SEQ ID NO: 2045 - DNA, 20 bp, Artificial
  Synthetically generated peptide
agaggcgatgtctccctcga

SEQ ID NO: 2046 - DNA, 20 bp, Artificial
  Synthetically generated peptide
gagaggcgatgtctccctcg

SEQ ID NO: 2047 - DNA, 20 bp, Artificial
  Synthetically generated peptide
ggagaggcgatgtctccctc

SEQ ID NO: 2048 - DNA, 20 bp, Artificial
  Synthetically generated peptide
tggagaggcgatgtctccct

SEQ ID NO: 2049 - DNA, 20 bp, Artificial
  Synthetically generated peptide
ttggagaggcgatgtctccc

SEQ ID NO: 2050 - DNA, 20 bp, Artificial
  Synthetically generated peptide
cttggagaggcgatgtctcc

SEQ ID NO: 2051 - DNA, 20 bp, Artificial
  Synthetically generated peptide
gcttggagaggcgatgtctc

SEQ ID NO: 2052 - DNA, 20 bp, Artificial
  Synthetically generated peptide
ggcttggagaggcgatgtct

SEQ ID NO: 2053 - DNA, 20 bp, Artificial
  Synthetically generated peptide
aggcttggagaggcgatgtc

SEQ ID NO: 2054 - DNA, 24 bp, Artificial
  Synthetically generated peptide
ggacggacggatatctgaggccag

SEQ ID NO: 2055 - DNA, 20 bp, Artificial
  Synthetically generated peptide
gacggacggatatctgaggc

SEQ ID NO: 2056 - DNA, 20 bp, Artificial
  Synthetically generated peptide
acggacggatatctgaggcc

SEQ ID NO: 2057 - DNA, 20 bp, Artificial
  Synthetically generated peptide
cggacggatatctgaggcca

SEQ ID NO: 2058 - DNA, 20 bp, Artificial
  Synthetically generated peptide
ggacggatatctgaggccag

SEQ ID NO: 2059 - DNA, 20 bp, Artificial
  Synthetically generated peptide
gacggatatctgaggccagg

SEQ ID NO: 2060 - DNA, 20 bp, Artificial
  Synthetically generated peptide
acggatatctgaggccagga

SEQ ID NO: 2061 - DNA, 20 bp, Artificial
  Synthetically generated peptide
cggatatctgaggccaggag

SEQ ID NO: 2062 - DNA, 22 bp, Artificial
  Synthetically generated peptide
cgtccccgccacgttgaaaggc

SEQ ID NO: 2063 - DNA, 20 bp, Artificial
  Synthetically generated peptide
gtccccgccacgttgaaagg

SEQ ID NO: 2064 - DNA, 20 bp, Artificial
  Synthetically generated peptide
tccccgccacgttgaaaggc

SEQ ID NO: 2065 - DNA, 20 bp, Artificial
  Synthetically generated peptide
ccccgccacgttgaaaggca

SEQ ID NO: 2066 - DNA, 20 bp, Artificial
  Synthetically generated peptide
cccgccacgttgaaaggcag

SEQ ID NO: 2067 - DNA, 20 bp, Artificial
  Synthetically generated peptide
ccgccacgttgaaaggcagc

SEQ ID NO: 2068 - DNA, 20 bp, Artificial
  Synthetically generated peptide
cgccacgttgaaaggcagca

SEQ ID NO: 2069 - DNA, 20 bp, Artificial
  Synthetically generated peptide
gccacgttgaaaggcagcag

SEQ ID NO: 2070 - DNA, 20 bp, Artificial
  Synthetically generated peptide
ccacgttgaaaggcagcagg

SEQ ID NO: 2071 - DNA, 20 bp, Artificial
  Synthetically generated peptide
cacgttgaaaggcagcaggt

SEQ ID NO: 2072 - DNA, 20 bp, Artificial
  Synthetically generated peptide
acgttgaaaggcagcaggtc

SEQ ID NO: 2073 - DNA, 20 bp, Artificial
  Synthetically generated peptide
cgttgaaaggcagcaggtcc

SEQ ID NO: 2074 - DNA, 20 bp, Artificial
  Synthetically generated peptide
acgtccccgccacgttgaaa

SEQ ID NO: 2075 - DNA, 20 bp, Artificial
  Synthetically generated peptide
cacgtccccgccacgttgaa

SEQ ID NO: 2076 - DNA, 20 bp, Artificial
  Synthetically generated peptide
tcacgtccccgccacgttga

SEQ ID NO: 2077 - DNA, 20 bp, Artificial
  Synthetically generated peptide
gtcacgtccccgccacgttg

SEQ ID NO: 2078 - DNA, 20 bp, Artificial
  Synthetically generated peptide
ggtcacgtccccgccacgtt

SEQ ID NO: 2079 - DNA, 20 bp, Artificial
  Synthetically generated peptide
aggtcacgtccccgccacgt

SEQ ID NO: 2080 - DNA, 20 bp, Artificial
  Synthetically generated peptide
caggtcacgtccccgccacg

SEQ ID NO: 2081 - DNA, 20 bp, Artificial
  Synthetically generated peptide
acaggtcacgtccccgccac

SEQ ID NO: 2082 - DNA, 20 bp, Artificial
  Synthetically generated peptide
aacaggtcacgtccccgcca

SEQ ID NO: 2083 - DNA, 20 bp, Artificial
  Synthetically generated peptide
taacaggtcacgtccccgcc

SEQ ID NO: 2084 - DNA, 20 bp, Artificial
  Synthetically generated peptide
ttaacaggtcacgtccccgc

SEQ ID NO: 2085 - DNA, 20 bp, Artificial
  Synthetically generated peptide
attaacaggtcacgtccccg

SEQ ID NO: 2086 - DNA, 20 bp, Artificial
  Synthetically generated peptide
cattaacaggtcacgtcccc

SEQ ID NO: 2087 - DNA, 20 bp, Artificial
  Synthetically generated peptide
tcattaacaggtcacgtccc

SEQ ID NO: 2088 - DNA, 20 bp, Artificial
  Synthetically generated peptide
ttcattaacaggtcacgtcc

SEQ ID NO: 2089 - DNA, 28 bp, Artificial
  Synthetically generated peptide
tctcggacatgctcaaatggtgcaggcg

SEQ ID NO: 2090 - DNA, 20 bp, Artificial
  Synthetically generated peptide
ctcggacatgctcaaatggt

SEQ ID NO: 2091 - DNA, 20 bp, Artificial
  Synthetically generated peptide
tcggacatgctcaaatggtg

SEQ ID NO: 2092 - DNA, 20 bp, Artificial
  Synthetically generated peptide
cggacatgctcaaatggtgc

SEQ ID NO: 2093 - DNA, 20 bp, Artificial
  Synthetically generated peptide
ctctcggacatgctcaaatg

SEQ ID NO: 2094 - DNA, 20 bp, Artificial
  Synthetically generated peptide
gctctcggacatgctcaaat

SEQ ID NO: 2095 - DNA, 20 bp, Artificial
  Synthetically generated peptide
tgctctcggacatgctcaaa

SEQ ID NO: 2096 - DNA, 20 bp, Artificial
  Synthetically generated peptide
atgctctcggacatgctcaa

SEQ ID NO: 2097 - DNA, 20 bp, Artificial
  Synthetically generated peptide
gatgctctcggacatgctca

SEQ ID NO: 2098 - DNA, 20 bp, Artificial
  Synthetically generated peptide
ggatgctctcggacatgctc

SEQ ID NO: 2099 - DNA, 20 bp, Artificial
  Synthetically generated peptide
tggatgctctcggacatgct

SEQ ID NO: 2100 - DNA, 20 bp, Artificial
  Synthetically generated peptide
gtggatgctctcggacatgc

SEQ ID NO: 2101 - DNA, 20 bp, Artificial
  Synthetically generated peptide
ggtggatgctctcggacatg

SEQ ID NO: 2102 - DNA, 20 bp, Artificial
  Synthetically generated peptide
tggtggatgctctcggacat

SEQ ID NO: 2103 - DNA, 20 bp, Artificial
  Synthetically generated peptide
ctggtggatgctctcggaca

SEQ ID NO: 2104 - DNA, 20 bp, Artificial
  Synthetically generated peptide
tctggtggatgctctcggac

SEQ ID NO: 2105 - DNA, 20 bp, Artificial
  Synthetically generated peptide
ctctggtggatgctctcgga

SEQ ID NO: 2106 - DNA, 20 bp, Artificial
  Synthetically generated peptide
actctggtggatgctctcgg

SEQ ID NO: 2107 - DNA, 20 bp, Artificial
  Synthetically generated peptide
cactctggtggatgctctcg

SEQ ID NO: 2108 - DNA, 26 bp, Artificial
  Synthetically generated peptide
caccgacaggagccaatagtgcaacg

SEQ ID NO: 2109 - DNA, 20 bp, Artificial
  Synthetically generated peptide
accgacaggagccaatagtg

SEQ ID NO: 2110 - DNA, 20 bp, Artificial
  Synthetically generated peptide
ccgacaggagccaatagtgc

SEQ ID NO: 2111 - DNA, 20 bp, Artificial
  Synthetically generated peptide
cgacaggagccaatagtgca

SEQ ID NO: 2112 - DNA, 20 bp, Artificial
  Synthetically generated peptide
tcaccgacaggagccaatag

SEQ ID NO: 2113 - DNA, 20 bp, Artificial
  Synthetically generated peptide
ctcaccgacaggagccaata

SEQ ID NO: 2114 - DNA, 20 bp, Artificial
  Synthetically generated peptide
actcaccgacaggagccaat

SEQ ID NO: 2115 - DNA, 20 bp, Artificial
  Synthetically generated peptide
cactcaccgacaggagccaa

SEQ ID NO: 2116 - DNA, 20 bp, Artificial
  Synthetically generated peptide
gcactcaccgacaggagcca

SEQ ID NO: 2117 - DNA, 20 bp, Artificial
  Synthetically generated peptide
tgcactcaccgacaggagcc

SEQ ID NO: 2118 - DNA, 20 bp, Artificial
  Synthetically generated peptide
ctgcactcaccgacaggagc

SEQ ID NO: 2119 - DNA, 20 bp, Artificial
  Synthetically generated peptide
actgcactcaccgacaggag

SEQ ID NO: 2120 - DNA, 20 bp, Artificial
  Synthetically generated peptide
cactgcactcaccgacagga

SEQ ID NO: 2121 - DNA, 20 bp, Artificial
  Synthetically generated peptide
gcactgcactcaccgacagg

SEQ ID NO: 2122 - DNA, 20 bp, Artificial
  Synthetically generated peptide
ggcactgcactcaccgacag

SEQ ID NO: 2123 - DNA, 20 bp, Artificial
  Synthetically generated peptide
aggcactgcactcaccgaca

SEQ ID NO: 2124 - DNA, 20 bp, Artificial
  Synthetically generated peptide
caggcactgcactcaccgac

SEQ ID NO: 2125 - DNA, 20 bp, Artificial
  Synthetically generated peptide
tcaggcactgcactcaccga

SEQ ID NO: 2126 - DNA, 20 bp, Artificial
  Synthetically generated peptide
gtcaggcactgcactcaccg

SEQ ID NO: 2127 - DNA, 26 bp, Artificial
  Synthetically generated peptide
gtccggcagagggacccatgctgacg

SEQ ID NO: 2128 - DNA, 20 bp, Artificial
  Synthetically generated peptide
tccggcagagggacccatgc

SEQ ID NO: 2129 - DNA, 20 bp, Artificial
  Synthetically generated peptide
ccggcagagggacccatgct

SEQ ID NO: 2130 - DNA, 20 bp, Artificial
  Synthetically generated peptide
cggcagagggacccatgctg

SEQ ID NO: 2131 - DNA, 20 bp, Artificial
  Synthetically generated peptide
ggtccggcagagggacccat

SEQ ID NO: 2132 - DNA, 20 bp, Artificial
  Synthetically generated peptide
tggtccggcagagggaccca

SEQ ID NO: 2133 - DNA, 20 bp, Artificial
  Synthetically generated peptide
gtggtccggcagagggaccc

SEQ ID NO: 2134 - DNA, 20 bp, Artificial
  Synthetically generated peptide
tgtggtccggcagagggacc

SEQ ID NO: 2135 - DNA, 20 bp, Artificial
  Synthetically generated peptide
gtgtggtccggcagagggac

SEQ ID NO: 2136 - DNA, 21 bp, Artificial
  Synthetically generated peptide
cgtgaggcacatgtccgtgtg

SEQ ID NO: 2137 - DNA, 20 bp, Artificial
  Synthetically generated peptide
gtgaggcacatgtccgtgtg

SEQ ID NO: 2138 - DNA, 20 bp, Artificial
  Synthetically generated peptide
tgaggcacatgtccgtgtga

SEQ ID NO: 2139 - DNA, 20 bp, Artificial
  Synthetically generated peptide
gaggcacatgtccgtgtgac

SEQ ID NO: 2140 - DNA, 20 bp, Artificial
  Synthetically generated peptide
aggcacatgtccgtgtgacc

SEQ ID NO: 2141 - DNA, 20 bp, Artificial
  Synthetically generated peptide
ggcacatgtccgtgtgacct

SEQ ID NO: 2142 - DNA, 20 bp, Artificial
  Synthetically generated peptide
gcacatgtccgtgtgacctg

SEQ ID NO: 2143 - DNA, 20 bp, Artificial
  Synthetically generated peptide
cacatgtccgtgtgacctgc

SEQ ID NO: 2144 - DNA, 20 bp, Artificial
  Synthetically generated peptide
acatgtccgtgtgacctgcc

SEQ ID NO: 2145 - DNA, 20 bp, Artificial
  Synthetically generated peptide
catgtccgtgtgacctgcct

SEQ ID NO: 2146 - DNA, 20 bp, Artificial
  Synthetically generated peptide
atgtccgtgtgacctgcctg

SEQ ID NO: 2147 - DNA, 20 bp, Artificial
  Synthetically generated peptide
tgtccgtgtgacctgcctgt

SEQ ID NO: 2148 - DNA, 20 bp, Artificial
  Synthetically generated peptide
gtccgtgtgacctgcctgtc

SEQ ID NO: 2149 - DNA, 20 bp, Artificial
  Synthetically generated peptide
tccgtgtgacctgcctgtcc

SEQ ID NO: 2150 - DNA, 20 bp, Artificial
  Synthetically generated peptide
ccgtgtgacctgcctgtccc

SEQ ID NO: 2151 - DNA, 20 bp, Artificial
  Synthetically generated peptide
cgtgtgacctgcctgtccct

SEQ ID NO: 2152 - DNA, 20 bp, Artificial
  Synthetically generated peptide
acgtgaggcacatgtccgtg

SEQ ID NO: 2153 - DNA, 20 bp, Artificial
  Synthetically generated peptide
tacgtgaggcacatgtccgt

SEQ ID NO: 2154 - DNA, 20 bp, Artificial
  Synthetically generated peptide
atacgtgaggcacatgtccg

SEQ ID NO: 2155 - DNA, 20 bp, Artificial
  Synthetically generated peptide
catacgtgaggcacatgtcc

SEQ ID NO: 2156 - DNA, 20 bp, Artificial
  Synthetically generated peptide
gcatacgtgaggcacatgtc

SEQ ID NO: 2157 - DNA, 20 bp, Artificial
  Synthetically generated peptide
agcatacgtgaggcacatgt

SEQ ID NO: 2158 - DNA, 20 bp, Artificial
  Synthetically generated peptide
aagcatacgtgaggcacatg

SEQ ID NO: 2159 - DNA, 20 bp, Artificial
  Synthetically generated peptide
gaagcatacgtgaggcacat

SEQ ID NO: 2160 - DNA, 20 bp, Artificial
  Synthetically generated peptide
tgaagcatacgtgaggcaca

SEQ ID NO: 2161 - DNA, 20 bp, Artificial
  Synthetically generated peptide
ttgaagcatacgtgaggcac

SEQ ID NO: 2162 - DNA, 20 bp, Artificial
  Synthetically generated peptide
cttgaagcatacgtgaggca

SEQ ID NO: 2163 - DNA, 20 bp, Artificial
  Synthetically generated peptide
ccttgaagcatacgtgaggc

SEQ ID NO: 2164 - DNA, 20 bp, Artificial
  Synthetically generated peptide
cccttgaagcatacgtgagg

SEQ ID NO: 2165 - DNA, 20 bp, Artificial
  Synthetically generated peptide
ccccttgaagcatacgtgag

SEQ ID NO: 2166 - DNA, 20 bp, Artificial
  Synthetically generated peptide
gccccttgaagcatacgtga

SEQ ID NO: 2167 - DNA, 20 bp, Artificial
  Synthetically generated peptide
ggccccttgaagcatacgtg

SEQ ID NO: 2168 - DNA, 20 bp, Artificial
  Synthetically generated peptide
gggccccttgaagcatacgt

SEQ ID NO: 2169 - DNA, 20 bp, Artificial
  Synthetically generated peptide
agggccccttgaagcatacg

SEQ ID NO: 2170 - DNA, 25 bp, Artificial
  Synthetically generated peptide
cagatgcagcaagcgggcgggagag

SEQ ID NO: 2171 - DNA, 20 bp, Artificial
  Synthetically generated peptide
ccagatgcagcaagcgggcg

SEQ ID NO: 2172 - DNA, 20 bp, Artificial
  Synthetically generated peptide
tccagatgcagcaagcgggc

SEQ ID NO: 2173 - DNA, 20 bp, Artificial
  Synthetically generated peptide
gtccagatgcagcaagcggg

SEQ ID NO: 2174 - DNA, 20 bp, Artificial
  Synthetically generated peptide
tgtccagatgcagcaagcgg

SEQ ID NO: 2175 - DNA, 20 bp, Artificial
  Synthetically generated peptide
gtgtccagatgcagcaagcg

SEQ ID NO: 2176 - DNA, 28 bp, Artificial
  Synthetically generated peptide
ccacgctgctgtcccgccagccctgcag

SEQ ID NO: 2177 - DNA, 20 bp, Artificial
  Synthetically generated peptide
cacgctgctgtcccgccagc

SEQ ID NO: 2178 - DNA, 20 bp, Artificial
  Synthetically generated peptide
acgctgctgtcccgccagcc

SEQ ID NO: 2179 - DNA, 20 bp, Artificial
  Synthetically generated peptide
cgctgctgtcccgccagccc

SEQ ID NO: 2180 - DNA, 20 bp, Artificial
  Synthetically generated peptide
gctgctgtcccgccagccct

SEQ ID NO: 2181 - DNA, 20 bp, Artificial
  Synthetically generated peptide
ctgctgtcccgccagccctg

SEQ ID NO: 2182 - DNA, 20 bp, Artificial
  Synthetically generated peptide
tgctgtcccgccagccctgc

SEQ ID NO: 2183 - DNA, 20 bp, Artificial
  Synthetically generated peptide
gctgtcccgccagccctgca

SEQ ID NO: 2184 - DNA, 20 bp, Artificial
  Synthetically generated peptide
ctgtcccgccagccctgcag

SEQ ID NO: 2185 - DNA, 20 bp, Artificial
  Synthetically generated peptide
tgtcccgccagccctgcagc

SEQ ID NO: 2186 - DNA, 20 bp, Artificial
  Synthetically generated peptide
gtcccgccagccctgcagcc

SEQ ID NO: 2187 - DNA, 20 bp, Artificial
  Synthetically generated peptide
tcccgccagccctgcagccc

SEQ ID NO: 2188 - DNA, 20 bp, Artificial
  Synthetically generated peptide
cccgccagccctgcagccca

SEQ ID NO: 2189 - DNA, 20 bp, Artificial
  Synthetically generated peptide
ccgccagccctgcagcccag

SEQ ID NO: 2190 - DNA, 20 bp, Artificial
  Synthetically generated peptide
cgccagccctgcagcccaga

SEQ ID NO: 2191 - DNA, 20 bp, Artificial
  Synthetically generated peptide
tccacgctgctgtcccgcca

SEQ ID NO: 2192 - DNA, 20 bp, Artificial
  Synthetically generated peptide
gtccacgctgctgtcccgcc

SEQ ID NO: 2193 - DNA, 20 bp, Artificial
  Synthetically generated peptide
agtccacgctgctgtcccgc

SEQ ID NO: 2194 - DNA, 20 bp, Artificial
  Synthetically generated peptide
gagtccacgctgctgtcccg

SEQ ID NO: 2195 - DNA, 20 bp, Artificial
  Synthetically generated peptide
tgagtccacgctgctgtccc

SEQ ID NO: 2196 - DNA, 20 bp, Artificial
  Synthetically generated peptide
ctgagtccacgctgctgtcc

SEQ ID NO: 2197 - DNA, 20 bp, Artificial
  Synthetically generated peptide
actgagtccacgctgctgtc

SEQ ID NO: 2198 - DNA, 20 bp, Artificial
  Synthetically generated peptide
gactgagtccacgctgctgt

SEQ ID NO: 2199 - DNA, 20 bp, Artificial
  Synthetically generated peptide
agactgagtccacgctgctg

SEQ ID NO: 2200 - DNA, 20 bp, Artificial
  Synthetically generated peptide
gagactgagtccacgctgct

SEQ ID NO: 2201 - DNA, 20 bp, Artificial
  Synthetically generated peptide
ggagactgagtccacgctgc

SEQ ID NO: 2202 - DNA, 20 bp, Artificial
  Synthetically generated peptide
aggagactgagtccacgctg

SEQ ID NO: 2203 - DNA, 20 bp, Artificial
  Synthetically generated peptide
taggagactgagtccacgct

SEQ ID NO: 2204 - DNA, 20 bp, Artificial
  Synthetically generated peptide
ctaggagactgagtccacgc

SEQ ID NO: 2205 - DNA, 20 bp, Artificial
  Synthetically generated peptide
cctaggagactgagtccacg

SEQ ID NO: 2206 - DNA, 27 bp, Artificial
  Synthetically generated peptide
acccgcccccaccctgtgtgccccccg

SEQ ID NO: 2207 - DNA, 20 bp, Artificial
  Synthetically generated peptide
cccgcccccaccctgtgtgc

SEQ ID NO: 2208 - DNA, 20 bp, Artificial
  Synthetically generated peptide
ccgcccccaccctgtgtgcc

SEQ ID NO: 2209 - DNA, 20 bp, Artificial
  Synthetically generated peptide
cgcccccaccctgtgtgccc

SEQ ID NO: 2210 - DNA, 20 bp, Artificial
  Synthetically generated peptide
cacccgcccccaccctgtgt

SEQ ID NO: 2211 - DNA, 20 bp, Artificial
  Synthetically generated peptide
ccacccgcccccaccctgtg

SEQ ID NO: 2212 - DNA, 20 bp, Artificial
  Synthetically generated peptide
cccacccgcccccaccctgt

SEQ ID NO: 2213 - DNA, 20 bp, Artificial
  Synthetically generated peptide
ccccacccgcccccaccctg

SEQ ID NO: 2214 - DNA, 20 bp, Artificial
  Synthetically generated peptide
cccccacccgcccccaccct

SEQ ID NO: 2215 - DNA, 20 bp, Artificial
  Synthetically generated peptide
ccccccacccgcccccaccc

SEQ ID NO: 2216 - DNA, 20 bp, Artificial
  Synthetically generated peptide
gccccccacccgcccccacc

SEQ ID NO: 2217 - DNA, 20 bp, Artificial
  Synthetically generated peptide
agccccccacccgcccccac

SEQ ID NO: 2218 - DNA, 20 bp, Artificial
  Synthetically generated peptide
cagccccccacccgccccca

SEQ ID NO: 2219 - DNA, 20 bp, Artificial
  Synthetically generated peptide
gcagccccccacccgccccc

SEQ ID NO: 2220 - DNA, 20 bp, Artificial
  Synthetically generated peptide
agcagccccccacccgcccc

SEQ ID NO: 2221 - DNA, 20 bp, Artificial
  Synthetically generated peptide
cagcagccccccacccgccc

SEQ ID NO: 2222 - DNA, 20 bp, Artificial
  Synthetically generated peptide
ccagcagccccccacccgcc

SEQ ID NO: 2223 - DNA, 20 bp, Artificial
  Synthetically generated peptide
cccagcagccccccacccgc

SEQ ID NO: 2224 - DNA, 20 bp, Artificial
  Synthetically generated peptide
acccagcagccccccacccg

SEQ ID NO: 2225 - DNA, 22 bp, Artificial
  Synthetically generated peptide
cgctcagagcccgaggcctttg

SEQ ID NO: 2226 - DNA, 20 bp, Artificial
  Synthetically generated peptide
gctcagagcccgaggccttt

SEQ ID NO: 2227 - DNA, 20 bp, Artificial
  Synthetically generated peptide
ctcagagcccgaggcctttg

SEQ ID NO: 2228 - DNA, 20 bp, Artificial
  Synthetically generated peptide
tcagagcccgaggcctttgc

SEQ ID NO: 2229 - DNA, 20 bp, Artificial
  Synthetically generated peptide
cagagcccgaggcctttgcc

SEQ ID NO: 2230 - DNA, 20 bp, Artificial
  Synthetically generated peptide
agagcccgaggcctttgccc

SEQ ID NO: 2231 - DNA, 20 bp, Artificial
  Synthetically generated peptide
gagcccgaggcctttgcccc

SEQ ID NO: 2232 - DNA, 20 bp, Artificial
  Synthetically generated peptide
agcccgaggcctttgcccct

SEQ ID NO: 2233 - DNA, 20 bp, Artificial
  Synthetically generated peptide
gcccgaggcctttgcccctc

SEQ ID NO: 2234 - DNA, 20 bp, Artificial
  Synthetically generated peptide
cccgaggcctttgcccctcc

SEQ ID NO: 2235 - DNA, 20 bp, Artificial
  Synthetically generated peptide
ccgaggcctttgcccctccc

SEQ ID NO: 2236 - DNA, 20 bp, Artificial
  Synthetically generated peptide
cgaggcctttgcccctccct

SEQ ID NO: 2237 - DNA, 20 bp, Artificial
  Synthetically generated peptide
ccgctcagagcccgaggcct

SEQ ID NO: 2238 - DNA, 20 bp, Artificial
  Synthetically generated peptide
gccgctcagagcccgaggcc

SEQ ID NO: 2239 - DNA, 20 bp, Artificial
  Synthetically generated peptide
ggccgctcagagcccgaggc

SEQ ID NO: 2240 - DNA, 20 bp, Artificial
  Synthetically generated peptide
aggccgctcagagcccgagg

SEQ ID NO: 2241 - DNA, 20 bp, Artificial
  Synthetically generated peptide
aaggccgctcagagcccgag

SEQ ID NO: 2242 - DNA, 20 bp, Artificial
  Synthetically generated peptide
caaggccgctcagagcccga

SEQ ID NO: 2243 - DNA, 20 bp, Artificial
  Synthetically generated peptide
ccaaggccgctcagagcccg

SEQ ID NO: 2244 - DNA, 20 bp, Artificial
  Synthetically generated peptide
gccaaggccgctcagagccc

SEQ ID NO: 2245 - DNA, 20 bp, Artificial
  Synthetically generated peptide
ggccaaggccgctcagagcc

SEQ ID NO: 2246 - DNA, 20 bp, Artificial
  Synthetically generated peptide
gggccaaggccgctcagagc

SEQ ID NO: 2247 - DNA, 20 bp, Artificial
  Synthetically generated peptide
agggccaaggccgctcagag

SEQ ID NO: 2248 - DNA, 20 bp, Artificial
  Synthetically generated peptide
aagggccaaggccgctcaga

SEQ ID NO: 2249 - DNA, 20 bp, Artificial
  Synthetically generated peptide
gaagggccaaggccgctcag

SEQ ID NO: 2250 - DNA, 20 bp, Artificial
  Synthetically generated peptide
agaagggccaaggccgctca

SEQ ID NO: 2251 - DNA, 20 bp, Artificial
  Synthetically generated peptide
gagaagggccaaggccgctc

SEQ ID NO: 2252 - DNA, 23 bp, Artificial
  Synthetically generated peptide
cggtggggcggctcctgggctgc

SEQ ID NO: 2253 - DNA, 20 bp, Artificial
  Synthetically generated peptide
ggtggggcggctcctgggct

SEQ ID NO: 2254 - DNA, 20 bp, Artificial
  Synthetically generated peptide
gtggggcggctcctgggctg

SEQ ID NO: 2255 - DNA, 20 bp, Artificial
  Synthetically generated peptide
tggggcggctcctgggctgc

SEQ ID NO: 2256 - DNA, 20 bp, Artificial
  Synthetically generated peptide
ggggcggctcctgggctgcg

SEQ ID NO: 2257 - DNA, 20 bp, Artificial
  Synthetically generated peptide
gggcggctcctgggctgcgg

SEQ ID NO: 2258 - DNA, 20 bp, Artificial
  Synthetically generated peptide
ggcggctcctgggctgcggc

SEQ ID NO: 2259 - DNA, 20 bp, Artificial
  Synthetically generated peptide
gcggctcctgggctgcggcc

SEQ ID NO: 2260 - DNA, 20 bp, Artificial
  Synthetically generated peptide
cggctcctgggctgcggcct

SEQ ID NO: 2261 - DNA, 20 bp, Artificial
  Synthetically generated peptide
ggctcctgggctgcggcctg

SEQ ID NO: 2262 - DNA, 20 bp, Artificial
  Synthetically generated peptide
gctcctgggctgcggcctgg

SEQ ID NO: 2263 - DNA, 20 bp, Artificial
  Synthetically generated peptide
ctcctgggctgcggcctggc

SEQ ID NO: 2264 - DNA, 20 bp, Artificial
  Synthetically generated peptide
tcctgggctgcggcctggcc

SEQ ID NO: 2265 - DNA, 20 bp, Artificial
  Synthetically generated peptide
cctgggctgcggcctggcct

SEQ ID NO: 2266 - DNA, 20 bp, Artificial
  Synthetically generated peptide
ctgggctgcggcctggcctc

SEQ ID NO: 2267 - DNA, 20 bp, Artificial
  Synthetically generated peptide
tgggctgcggcctggcctcg

SEQ ID NO: 2268 - DNA, 20 bp, Artificial
  Synthetically generated peptide
gggctgcggcctggcctcgg

SEQ ID NO: 2269 - DNA, 20 bp, Artificial
  Synthetically generated peptide
ggctgcggcctggcctcggc

SEQ ID NO: 2270 - DNA, 20 bp, Artificial
  Synthetically generated peptide
gctgcggcctggcctcggcc

SEQ ID NO: 2271 - DNA, 20 bp, Artificial
  Synthetically generated peptide
ctgcggcctggcctcggcct

SEQ ID NO: 2272 - DNA, 20 bp, Artificial
  Synthetically generated peptide
tgcggcctggcctcggcctc

SEQ ID NO: 2273 - DNA, 20 bp, Artificial
  Synthetically generated peptide
gcggcctggcctcggcctcg

SEQ ID NO: 2274 - DNA, 20 bp, Artificial
  Synthetically generated peptide
cggcctggcctcggcctcgc

SEQ ID NO: 2275 - DNA, 20 bp, Artificial
  Synthetically generated peptide
ggcctggcctcggcctcgcg

SEQ ID NO: 2276 - DNA, 20 bp, Artificial
  Synthetically generated peptide
gcctggcctcggcctcgcgg

SEQ ID NO: 2277 - DNA, 20 bp, Artificial
  Synthetically generated peptide
cctggcctcggcctcgcggc

SEQ ID NO: 2278 - DNA, 20 bp, Artificial
  Synthetically generated peptide
ctggcctcggcctcgcggcc

SEQ ID NO: 2279 - DNA, 20 bp, Artificial
  Synthetically generated peptide
tggcctcggcctcgcggccc

SEQ ID NO: 2280 - DNA, 20 bp, Artificial
  Synthetically generated peptide
ggcctcggcctcgcggccct

SEQ ID NO: 2281 - DNA, 20 bp, Artificial
  Synthetically generated peptide
gcctcggcctcgcggccctg

SEQ ID NO: 2282 - DNA, 20 bp, Artificial
  Synthetically generated peptide
cctcggcctcgcggccctgg

SEQ ID NO: 2283 - DNA, 20 bp, Artificial
  Synthetically generated peptide
ctcggcctcgcggccctggc

SEQ ID NO: 2284 - DNA, 20 bp, Artificial
  Synthetically generated peptide
tcggcctcgcggccctggct

SEQ ID NO: 2285 - DNA, 20 bp, Artificial
  Synthetically generated peptide
cggcctcgcggccctggctg

SEQ ID NO: 2286 - DNA, 20 bp, Artificial
  Synthetically generated peptide
ggcctcgcggccctggctgg

SEQ ID NO: 2287 - DNA, 20 bp, Artificial
  Synthetically generated peptide
gcctcgcggccctggctggc

SEQ ID NO: 2288 - DNA, 20 bp, Artificial
  Synthetically generated peptide
cctcgcggccctggctggct

SEQ ID NO: 2289 - DNA, 20 bp, Artificial
  Synthetically generated peptide
ctcgcggccctggctggctg

SEQ ID NO: 2290 - DNA, 20 bp, Artificial
  Synthetically generated peptide
tcgcggccctggctggctgg

SEQ ID NO: 2291 - DNA, 20 bp, Artificial
  Synthetically generated peptide
cgcggccctggctggctggg

SEQ ID NO: 2292 - DNA, 20 bp, Artificial
  Synthetically generated peptide
gcggccctggctggctgggc

SEQ ID NO: 2293 - DNA, 20 bp, Artificial
  Synthetically generated peptide
cggccctggctggctgggcg

SEQ ID NO: 2294 - DNA, 20 bp, Artificial
  Synthetically generated peptide
ggccctggctggctgggcgg

SEQ ID NO: 2295 - DNA, 20 bp, Artificial
  Synthetically generated peptide
gccctggctggctgggcggg

SEQ ID NO: 2296 - DNA, 20 bp, Artificial
  Synthetically generated peptide
ccctggctggctgggcgggc

SEQ ID NO: 2297 - DNA, 20 bp, Artificial
  Synthetically generated peptide
cctggctggctgggcgggct

SEQ ID NO: 2298 - DNA, 20 bp, Artificial
  Synthetically generated peptide
ctggctggctgggcgggctc

SEQ ID NO: 2299 - DNA, 20 bp, Artificial
  Synthetically generated peptide
tggctggctgggcgggctcc

SEQ ID NO: 2300 - DNA, 20 bp, Artificial
  Synthetically generated peptide
ggctggctgggcgggctcct

SEQ ID NO: 2301 - DNA, 20 bp, Artificial
  Synthetically generated peptide
gctggctgggcgggctcctc

SEQ ID NO: 2302 - DNA, 20 bp, Artificial
  Synthetically generated peptide
ctggctgggcgggctcctca

SEQ ID NO: 2303 - DNA, 20 bp, Artificial
  Synthetically generated peptide
tggctgggcgggctcctcag

SEQ ID NO: 2304 - DNA, 20 bp, Artificial
  Synthetically generated peptide
ggctgggcgggctcctcagc

SEQ ID NO: 2305 - DNA, 20 bp, Artificial
  Synthetically generated peptide
gctgggcgggctcctcagcg

SEQ ID NO: 2306 - DNA, 20 bp, Artificial
  Synthetically generated peptide
ctgggcgggctcctcagcgg

SEQ ID NO: 2307 - DNA, 20 bp, Artificial
  Synthetically generated peptide
tgggcgggctcctcagcggc

SEQ ID NO: 2308 - DNA, 20 bp, Artificial
  Synthetically generated peptide
gggcgggctcctcagcggca

SEQ ID NO: 2309 - DNA, 20 bp, Artificial
  Synthetically generated peptide
ggcgggctcctcagcggcag

SEQ ID NO: 2310 - DNA, 20 bp, Artificial
  Synthetically generated peptide
gcgggctcctcagcggcagc

SEQ ID NO: 2311 - DNA, 20 bp, Artificial
  Synthetically generated peptide
cgggctcctcagcggcagca

SEQ ID NO: 2312 - DNA, 20 bp, Artificial
  Synthetically generated peptide
gggctcctcagcggcagcaa

SEQ ID NO: 2313 - DNA, 20 bp, Artificial
  Synthetically generated peptide
ggctcctcagcggcagcaac

SEQ ID NO: 2314 - DNA, 20 bp, Artificial
  Synthetically generated peptide
gctcctcagcggcagcaacc

SEQ ID NO: 2315 - DNA, 20 bp, Artificial
  Synthetically generated peptide
ctcctcagcggcagcaaccg

SEQ ID NO: 2316 - DNA, 20 bp, Artificial
  Synthetically generated peptide
tcctcagcggcagcaaccga

SEQ ID NO: 2317 - DNA, 20 bp, Artificial
  Synthetically generated peptide
cctcagcggcagcaaccgag

SEQ ID NO: 2318 - DNA, 20 bp, Artificial
  Synthetically generated peptide
ctcagcggcagcaaccgaga

SEQ ID NO: 2319 - DNA, 20 bp, Artificial
  Synthetically generated peptide
tcagcggcagcaaccgagaa

SEQ ID NO: 2320 - DNA, 20 bp, Artificial
  Synthetically generated peptide
gcggtggggcggctcctggg

SEQ ID NO: 2321 - DNA, 20 bp, Artificial
  Synthetically generated peptide
tgcggtggggcggctcctgg

SEQ ID NO: 2322 - DNA, 20 bp, Artificial
  Synthetically generated peptide
ctgcggtggggcggctcctg

SEQ ID NO: 2323 - DNA, 20 bp, Artificial
  Synthetically generated peptide
gctgcggtggggcggctcct

SEQ ID NO: 2324 - DNA, 20 bp, Artificial
  Synthetically generated peptide
agctgcggtggggcggctcc

SEQ ID NO: 2325 - DNA, 20 bp, Artificial
  Synthetically generated peptide
cagctgcggtggggcggctc

SEQ ID NO: 2326 - DNA, 20 bp, Artificial
  Synthetically generated peptide
ccagctgcggtggggcggct

SEQ ID NO: 2327 - DNA, 20 bp, Artificial
  Synthetically generated peptide
gccagctgcggtggggcggc

SEQ ID NO: 2328 - DNA, 20 bp, Artificial
  Synthetically generated peptide
cgccagctgcggtggggcgg

SEQ ID NO: 2329 - DNA, 25 bp, Artificial
  Synthetically generated peptide
cctcgcggccctggctggctgggcg

SEQ ID NO: 2330 - DNA, 20 bp, Artificial
  Synthetically generated peptide
ctcgcggccctggctggctg

SEQ ID NO: 2331 - DNA, 20 bp, Artificial
  Synthetically generated peptide
tcgcggccctggctggctgg

SEQ ID NO: 2332 - DNA, 20 bp, Artificial
  Synthetically generated peptide
cgcggccctggctggctggg

SEQ ID NO: 2333 - DNA, 20 bp, Artificial
  Synthetically generated peptide
gcggccctggctggctgggc

SEQ ID NO: 2334 - DNA, 20 bp, Artificial
  Synthetically generated peptide
cggccctggctggctgggcg

SEQ ID NO: 2335 - DNA, 20 bp, Artificial
  Synthetically generated peptide
ggccctggctggctgggcgg

SEQ ID NO: 2336 - DNA, 20 bp, Artificial
  Synthetically generated peptide
gccctggctggctgggcggg

SEQ ID NO: 2337 - DNA, 20 bp, Artificial
  Synthetically generated peptide
ccctggctggctgggcgggc

SEQ ID NO: 2338 - DNA, 20 bp, Artificial
  Synthetically generated peptide
cctggctggctgggcgggct

SEQ ID NO: 2339 - DNA, 20 bp, Artificial
  Synthetically generated peptide
ctggctggctgggcgggctc

SEQ ID NO: 2340 - DNA, 20 bp, Artificial
  Synthetically generated peptide
tggctggctgggcgggctcc

SEQ ID NO: 2341 - DNA, 20 bp, Artificial
  Synthetically generated peptide
ggctggctgggcgggctcct

SEQ ID NO: 2342 - DNA, 20 bp, Artificial
  Synthetically generated peptide
gctggctgggcgggctcctc

SEQ ID NO: 2343 - DNA, 20 bp, Artificial
  Synthetically generated peptide
ctggctgggcgggctcctca

SEQ ID NO: 2344 - DNA, 20 bp, Artificial
  Synthetically generated peptide
tggctgggcgggctcctcag

SEQ ID NO: 2345 - DNA, 20 bp, Artificial
  Synthetically generated peptide
ggctgggcgggctcctcagc

SEQ ID NO: 2346 - DNA, 20 bp, Artificial
  Synthetically generated peptide
gctgggcgggctcctcagcg

SEQ ID NO: 2347 - DNA, 20 bp, Artificial
  Synthetically generated peptide
ctgggcgggctcctcagcgg

SEQ ID NO: 2348 - DNA, 20 bp, Artificial
  Synthetically generated peptide
tgggcgggctcctcagcggc

SEQ ID NO: 2349 - DNA, 20 bp, Artificial
  Synthetically generated peptide
gggcgggctcctcagcggca

SEQ ID NO: 2350 - DNA, 20 bp, Artificial
  Synthetically generated peptide
ggcgggctcctcagcggcag

SEQ ID NO: 2351 - DNA, 20 bp, Artificial
  Synthetically generated peptide
gcgggctcctcagcggcagc

SEQ ID NO: 2352 - DNA, 20 bp, Artificial
  Synthetically generated peptide
cgggctcctcagcggcagca

SEQ ID NO: 2353 - DNA, 20 bp, Artificial
  Synthetically generated peptide
gggctcctcagcggcagcaa

SEQ ID NO: 2354 - DNA, 20 bp, Artificial
  Synthetically generated peptide
ggctcctcagcggcagcaac

SEQ ID NO: 2355 - DNA, 20 bp, Artificial
  Synthetically generated peptide
gctcctcagcggcagcaacc

SEQ ID NO: 2356 - DNA, 20 bp, Artificial
  Synthetically generated peptide
ctcctcagcggcagcaaccg

SEQ ID NO: 2357 - DNA, 20 bp, Artificial
  Synthetically generated peptide
tcctcagcggcagcaaccga

SEQ ID NO: 2358 - DNA, 20 bp, Artificial
  Synthetically generated peptide
cctcagcggcagcaaccgag

SEQ ID NO: 2359 - DNA, 20 bp, Artificial
  Synthetically generated peptide
ctcagcggcagcaaccgaga

SEQ ID NO: 2360 - DNA, 20 bp, Artificial
  Synthetically generated peptide
tcagcggcagcaaccgagaa

SEQ ID NO: 2361 - DNA, 20 bp, Artificial
  Synthetically generated peptide
gcctcgcggccctggctggc

SEQ ID NO: 2362 - DNA, 20 bp, Artificial
  Synthetically generated peptide
ggcctcgcggccctggctgg

SEQ ID NO: 2363 - DNA, 20 bp, Artificial
  Synthetically generated peptide
cggcctcgcggccctggctg

SEQ ID NO: 2364 - DNA, 20 bp, Artificial
  Synthetically generated peptide
tcggcctcgcggccctggct

SEQ ID NO: 2365 - DNA, 20 bp, Artificial
  Synthetically generated peptide
ctcggcctcgcggccctggc

SEQ ID NO: 2366 - DNA, 20 bp, Artificial
  Synthetically generated peptide
cctcggcctcgcggccctgg

SEQ ID NO: 2367 - DNA, 20 bp, Artificial
  Synthetically generated peptide
gcctcggcctcgcggccctg

SEQ ID NO: 2368 - DNA, 20 bp, Artificial
  Synthetically generated peptide
ggcctcggcctcgcggccct

SEQ ID NO: 2369 - DNA, 20 bp, Artificial
  Synthetically generated peptide
tggcctcggcctcgcggccc

SEQ ID NO: 2370 - DNA, 20 bp, Artificial
  Synthetically generated peptide
ctggcctcggcctcgcggcc

SEQ ID NO: 2371 - DNA, 20 bp, Artificial
  Synthetically generated peptide
cctggcctcggcctcgcggc

SEQ ID NO: 2372 - DNA, 20 bp, Artificial
  Synthetically generated peptide
gcctggcctcggcctcgcgg

SEQ ID NO: 2373 - DNA, 20 bp, Artificial
  Synthetically generated peptide
ggcctggcctcggcctcgcg

SEQ ID NO: 2374 - DNA, 20 bp, Artificial
  Synthetically generated peptide
cggcctggcctcggcctcgc

SEQ ID NO: 2375 - DNA, 20 bp, Artificial
  Synthetically generated peptide
gcggcctggcctcggcctcg

SEQ ID NO: 2376 - DNA, 20 bp, Artificial
  Synthetically generated peptide
tgcggcctggcctcggcctc

SEQ ID NO: 2377 - DNA, 20 bp, Artificial
  Synthetically generated peptide
ctgcggcctggcctcggcct

SEQ ID NO: 2378 - DNA, 20 bp, Artificial
  Synthetically generated peptide
gctgcggcctggcctcggcc

SEQ ID NO: 2379 - DNA, 20 bp, Artificial
  Synthetically generated peptide
ggctgcggcctggcctcggc

SEQ ID NO: 2380 - DNA, 20 bp, Artificial
  Synthetically generated peptide
gggctgcggcctggcctcgg

SEQ ID NO: 2381 - DNA, 20 bp, Artificial
  Synthetically generated peptide
tgggctgcggcctggcctcg

SEQ ID NO: 2382 - DNA, 20 bp, Artificial
  Synthetically generated peptide
ctgggctgcggcctggcctc

SEQ ID NO: 2383 - DNA, 20 bp, Artificial
  Synthetically generated peptide
cctgggctgcggcctggcct

SEQ ID NO: 2384 - DNA, 20 bp, Artificial
  Synthetically generated peptide
tcctgggctgcggcctggcc

SEQ ID NO: 2385 - DNA, 20 bp, Artificial
  Synthetically generated peptide
ctcctgggctgcggcctggc

SEQ ID NO: 2386 - DNA, 20 bp, Artificial
  Synthetically generated peptide
gctcctgggctgcggcctgg

SEQ ID NO: 2387 - DNA, 20 bp, Artificial
  Synthetically generated peptide
ggctcctgggctgcggcctg

SEQ ID NO: 2388 - DNA, 20 bp, Artificial
  Synthetically generated peptide
cggctcctgggctgcggcct

SEQ ID NO: 2389 - DNA, 20 bp, Artificial
  Synthetically generated peptide
gcggctcctgggctgcggcc

SEQ ID NO: 2390 - DNA, 20 bp, Artificial
  Synthetically generated peptide
ggcggctcctgggctgcggc

SEQ ID NO: 2391 - DNA, 20 bp, Artificial
  Synthetically generated peptide
gggcggctcctgggctgcgg

SEQ ID NO: 2392 - DNA, 20 bp, Artificial
  Synthetically generated peptide
ggggcggctcctgggctgcg

SEQ ID NO: 2393 - DNA, 20 bp, Artificial
  Synthetically generated peptide
tggggcggctcctgggctgc

SEQ ID NO: 2394 - DNA, 20 bp, Artificial
  Synthetically generated peptide
gtggggcggctcctgggctg

SEQ ID NO: 2395 - DNA, 20 bp, Artificial
  Synthetically generated peptide
ggtggggcggctcctgggct

SEQ ID NO: 2396 - DNA, 20 bp, Artificial
  Synthetically generated peptide
cggtggggcggctcctgggc

SEQ ID NO: 2397 - DNA, 20 bp, Artificial
  Synthetically generated peptide
gcggtggggcggctcctggg

SEQ ID NO: 2398 - DNA, 20 bp, Artificial
  Synthetically generated peptide
tgcggtggggcggctcctgg

SEQ ID NO: 2399 - DNA, 20 bp, Artificial
  Synthetically generated peptide
ctgcggtggggcggctcctg

SEQ ID NO: 2400 - DNA, 20 bp, Artificial
  Synthetically generated peptide
gctgcggtggggcggctcct

SEQ ID NO: 2401 - DNA, 20 bp, Artificial
  Synthetically generated peptide
agctgcggtggggcggctcc

SEQ ID NO: 2402 - DNA, 20 bp, Artificial
  Synthetically generated peptide
cagctgcggtggggcggctc

SEQ ID NO: 2403 - DNA, 20 bp, Artificial
  Synthetically generated peptide
ccagctgcggtggggcggct

SEQ ID NO: 2404 - DNA, 20 bp, Artificial
  Synthetically generated peptide
gccagctgcggtggggcggc

SEQ ID NO: 2405 - DNA, 20 bp, Artificial
  Synthetically generated peptide
cgccagctgcggtggggcgg

SEQ ID NO: 2406 - DNA, 24 bp, Artificial
  Synthetically generated peptide
aaccgagaagggcactcagccccg

SEQ ID NO: 2407 - DNA, 20 bp, Artificial
  Synthetically generated peptide
accgagaagggcactcagcc

SEQ ID NO: 2408 - DNA, 20 bp, Artificial
  Synthetically generated peptide
ccgagaagggcactcagccc

SEQ ID NO: 2409 - DNA, 20 bp, Artificial
  Synthetically generated peptide
cgagaagggcactcagcccc

SEQ ID NO: 2410 - DNA, 20 bp, Artificial
  Synthetically generated peptide
gagaagggcactcagccccg

SEQ ID NO: 2411 - DNA, 20 bp, Artificial
  Synthetically generated peptide
agaagggcactcagccccgc

SEQ ID NO: 2412 - DNA, 20 bp, Artificial
  Synthetically generated peptide
gaagggcactcagccccgca

SEQ ID NO: 2413 - DNA, 20 bp, Artificial
  Synthetically generated peptide
aagggcactcagccccgcag

SEQ ID NO: 2414 - DNA, 20 bp, Artificial
  Synthetically generated peptide
agggcactcagccccgcagg

SEQ ID NO: 2415 - DNA, 20 bp, Artificial
  Synthetically generated peptide
gggcactcagccccgcaggt

SEQ ID NO: 2416 - DNA, 20 bp, Artificial
  Synthetically generated peptide
ggcactcagccccgcaggtc

SEQ ID NO: 2417 - DNA, 20 bp, Artificial
  Synthetically generated peptide
gcactcagccccgcaggtcc

SEQ ID NO: 2418 - DNA, 20 bp, Artificial
  Synthetically generated peptide
cactcagccccgcaggtccc

SEQ ID NO: 2419 - DNA, 20 bp, Artificial
  Synthetically generated peptide
actcagccccgcaggtcccg

SEQ ID NO: 2420 - DNA, 20 bp, Artificial
  Synthetically generated peptide
ctcagccccgcaggtcccgg

SEQ ID NO: 2421 - DNA, 20 bp, Artificial
  Synthetically generated peptide
tcagccccgcaggtcccggt

SEQ ID NO: 2422 - DNA, 20 bp, Artificial
  Synthetically generated peptide
cagccccgcaggtcccggtg

SEQ ID NO: 2423 - DNA, 20 bp, Artificial
  Synthetically generated peptide
agccccgcaggtcccggtgg

SEQ ID NO: 2424 - DNA, 20 bp, Artificial
  Synthetically generated peptide
gccccgcaggtcccggtggg

SEQ ID NO: 2425 - DNA, 20 bp, Artificial
  Synthetically generated peptide
ccccgcaggtcccggtggga

SEQ ID NO: 2426 - DNA, 20 bp, Artificial
  Synthetically generated peptide
cccgcaggtcccggtgggaa

SEQ ID NO: 2427 - DNA, 20 bp, Artificial
  Synthetically generated peptide
ccgcaggtcccggtgggaat

SEQ ID NO: 2428 - DNA, 20 bp, Artificial
  Synthetically generated peptide
cgcaggtcccggtgggaatg

SEQ ID NO: 2429 - DNA, 20 bp, Artificial
  Synthetically generated peptide
gcaggtcccggtgggaatgc

SEQ ID NO: 2430 - DNA, 20 bp, Artificial
  Synthetically generated peptide
caggtcccggtgggaatgcg

SEQ ID NO: 2431 - DNA, 20 bp, Artificial
  Synthetically generated peptide
aggtcccggtgggaatgcgc

SEQ ID NO: 2432 - DNA, 20 bp, Artificial
  Synthetically generated peptide
ggtcccggtgggaatgcgcg

SEQ ID NO: 2433 - DNA, 20 bp, Artificial
  Synthetically generated peptide
gtcccggtgggaatgcgcgg

SEQ ID NO: 2434 - DNA, 20 bp, Artificial
  Synthetically generated peptide
tcccggtgggaatgcgcggc

SEQ ID NO: 2435 - DNA, 20 bp, Artificial
  Synthetically generated peptide
cccggtgggaatgcgcggcc

SEQ ID NO: 2436 - DNA, 20 bp, Artificial
  Synthetically generated peptide
caaccgagaagggcactcag

SEQ ID NO: 2437 - DNA, 20 bp, Artificial
  Synthetically generated peptide
gcaaccgagaagggcactca

SEQ ID NO: 2438 - DNA, 20 bp, Artificial
  Synthetically generated peptide
agcaaccgagaagggcactc

SEQ ID NO: 2439 - DNA, 20 bp, Artificial
  Synthetically generated peptide
cagcaaccgagaagggcact

SEQ ID NO: 2440 - DNA, 24 bp, Artificial
  Synthetically generated peptide
cggcgcccgcaccccatttatagg

SEQ ID NO: 2441 - DNA, 20 bp, Artificial
  Synthetically generated peptide
ggcgcccgcaccccatttat

SEQ ID NO: 2442 - DNA, 20 bp, Artificial
  Synthetically generated peptide
gcgcccgcaccccatttata

SEQ ID NO: 2443 - DNA, 20 bp, Artificial
  Synthetically generated peptide
cgcccgcaccccatttatag

SEQ ID NO: 2444 - DNA, 20 bp, Artificial
  Synthetically generated peptide
gcccgcaccccatttatagg

SEQ ID NO: 2445 - DNA, 20 bp, Artificial
  Synthetically generated peptide
cccgcaccccatttatagga

SEQ ID NO: 2446 - DNA, 20 bp, Artificial
  Synthetically generated peptide
ccgcaccccatttataggaa

SEQ ID NO: 2447 - DNA, 20 bp, Artificial
  Synthetically generated peptide
cgcaccccatttataggaag

SEQ ID NO: 2448 - DNA, 20 bp, Artificial
  Synthetically generated peptide
ccggcgcccgcaccccattt

SEQ ID NO: 2449 - DNA, 20 bp, Artificial
  Synthetically generated peptide
gccggcgcccgcaccccatt

SEQ ID NO: 2450 - DNA, 20 bp, Artificial
  Synthetically generated peptide
ggccggcgcccgcaccccat

SEQ ID NO: 2451 - DNA, 23 bp, Artificial
  Synthetically generated peptide
gtccaaagggcgcctcccgggcc

SEQ ID NO: 2452 - DNA, 20 bp, Artificial
  Synthetically generated peptide
tccaaagggcgcctcccggg

SEQ ID NO: 2453 - DNA, 20 bp, Artificial
  Synthetically generated peptide
ccaaagggcgcctcccgggc

SEQ ID NO: 2454 - DNA, 20 bp, Artificial
  Synthetically generated peptide
caaagggcgcctcccgggcc

SEQ ID NO: 2455 - DNA, 20 bp, Artificial
  Synthetically generated peptide
aaagggcgcctcccgggcct

SEQ ID NO: 2456 - DNA, 20 bp, Artificial
  Synthetically generated peptide
aagggcgcctcccgggcctg

SEQ ID NO: 2457 - DNA, 20 bp, Artificial
  Synthetically generated peptide
agggcgcctcccgggcctga

SEQ ID NO: 2458 - DNA, 20 bp, Artificial
  Synthetically generated peptide
gggcgcctcccgggcctgac

SEQ ID NO: 2459 - DNA, 20 bp, Artificial
  Synthetically generated peptide
ggcgcctcccgggcctgacc

SEQ ID NO: 2460 - DNA, 20 bp, Artificial
  Synthetically generated peptide
gcgcctcccgggcctgacct

SEQ ID NO: 2461 - DNA, 20 bp, Artificial
  Synthetically generated peptide
cgcctcccgggcctgacctg

SEQ ID NO: 2462 - DNA, 20 bp, Artificial
  Synthetically generated peptide
gcctcccgggcctgacctgt

SEQ ID NO: 2463 - DNA, 20 bp, Artificial
  Synthetically generated peptide
cctcccgggcctgacctgtt

SEQ ID NO: 2464 - DNA, 20 bp, Artificial
  Synthetically generated peptide
ctcccgggcctgacctgttt

SEQ ID NO: 2465 - DNA, 20 bp, Artificial
  Synthetically generated peptide
tcccgggcctgacctgtttg

SEQ ID NO: 2466 - DNA, 20 bp, Artificial
  Synthetically generated peptide
cccgggcctgacctgtttgc

SEQ ID NO: 2467 - DNA, 20 bp, Artificial
  Synthetically generated peptide
ccgggcctgacctgtttgct

SEQ ID NO: 2468 - DNA, 20 bp, Artificial
  Synthetically generated peptide
cgggcctgacctgtttgctt

SEQ ID NO: 2469 - DNA, 20 bp, Artificial
  Synthetically generated peptide
ggtccaaagggcgcctcccg

SEQ ID NO: 2470 - DNA, 20 bp, Artificial
  Synthetically generated peptide
aggtccaaagggcgcctccc

SEQ ID NO: 2471 - DNA, 20 bp, Artificial
  Synthetically generated peptide
aaggtccaaagggcgcctcc

SEQ ID NO: 2472 - DNA, 20 bp, Artificial
  Synthetically generated peptide
aaaggtccaaagggcgcctc

SEQ ID NO: 2473 - DNA, 20 bp, Artificial
  Synthetically generated peptide
aaaaggtccaaagggcgcct

SEQ ID NO: 2474 - DNA, 20 bp, Artificial
  Synthetically generated peptide
caaaaggtccaaagggcgcc

SEQ ID NO: 2475 - DNA, 24 bp, Artificial
  Synthetically generated peptide
cgtcttcagtgctctggcgcggcc

SEQ ID NO: 2476 - DNA, 20 bp, Artificial
  Synthetically generated peptide
gtcttcagtgctctggcgcg

SEQ ID NO: 2477 - DNA, 20 bp, Artificial
  Synthetically generated peptide
tcttcagtgctctggcgcgg

SEQ ID NO: 2478 - DNA, 20 bp, Artificial
  Synthetically generated peptide
cttcagtgctctggcgcggc

SEQ ID NO: 2479 - DNA, 20 bp, Artificial
  Synthetically generated peptide
ttcagtgctctggcgcggcc

SEQ ID NO: 2480 - DNA, 20 bp, Artificial
  Synthetically generated peptide
tcagtgctctggcgcggccc

SEQ ID NO: 2481 - DNA, 20 bp, Artificial
  Synthetically generated peptide
cagtgctctggcgcggccct

SEQ ID NO: 2482 - DNA, 20 bp, Artificial
  Synthetically generated peptide
agtgctctggcgcggccctt

SEQ ID NO: 2483 - DNA, 20 bp, Artificial
  Synthetically generated peptide
gtgctctggcgcggcccttc

SEQ ID NO: 2484 - DNA, 20 bp, Artificial
  Synthetically generated peptide
tgctctggcgcggcccttcc

SEQ ID NO: 2485 - DNA, 20 bp, Artificial
  Synthetically generated peptide
gctctggcgcggcccttcct

SEQ ID NO: 2486 - DNA, 20 bp, Artificial
  Synthetically generated peptide
ctctggcgcggcccttcctg

SEQ ID NO: 2487 - DNA, 20 bp, Artificial
  Synthetically generated peptide
tctggcgcggcccttcctgt

SEQ ID NO: 2488 - DNA, 20 bp, Artificial
  Synthetically generated peptide
ctggcgcggcccttcctgtg

SEQ ID NO: 2489 - DNA, 20 bp, Artificial
  Synthetically generated peptide
tggcgcggcccttcctgtgt

SEQ ID NO: 2490 - DNA, 20 bp, Artificial
  Synthetically generated peptide
ggcgcggcccttcctgtgtc

SEQ ID NO: 2491 - DNA, 20 bp, Artificial
  Synthetically generated peptide
gcgcggcccttcctgtgtct

SEQ ID NO: 2492 - DNA, 20 bp, Artificial
  Synthetically generated peptide
cgcggcccttcctgtgtctc

SEQ ID NO: 2493 - DNA, 20 bp, Artificial
  Synthetically generated peptide
gcggcccttcctgtgtctca

SEQ ID NO: 2494 - DNA, 20 bp, Artificial
  Synthetically generated peptide
cggcccttcctgtgtctcag

SEQ ID NO: 2495 - DNA, 20 bp, Artificial
  Synthetically generated peptide
gcgtcttcagtgctctggcg

SEQ ID NO: 2496 - DNA, 20 bp, Artificial
  Synthetically generated peptide
agcgtcttcagtgctctggc

SEQ ID NO: 2497 - DNA, 20 bp, Artificial
  Synthetically generated peptide
aagcgtcttcagtgctctgg

SEQ ID NO: 2498 - DNA, 20 bp, Artificial
  Synthetically generated peptide
caagcgtcttcagtgctctg

SEQ ID NO: 2499 - DNA, 20 bp, Artificial
  Synthetically generated peptide
ccaagcgtcttcagtgctct

SEQ ID NO: 2500 - DNA, 20 bp, Artificial
  Synthetically generated peptide
cccaagcgtcttcagtgctc

SEQ ID NO: 2501 - DNA, 20 bp, Artificial
  Synthetically generated peptide
ccccaagcgtcttcagtgct

SEQ ID NO: 2502 - DNA, 20 bp, Artificial
  Synthetically generated peptide
tccccaagcgtcttcagtgc

SEQ ID NO: 2503 - DNA, 20 bp, Artificial
  Synthetically generated peptide
ttccccaagcgtcttcagtg

SEQ ID NO: 2504 - DNA, 20 bp, Artificial
  Synthetically generated peptide
cttccccaagcgtcttcagt

SEQ ID NO: 2505 - DNA, 20 bp, Artificial
  Synthetically generated peptide
ccttccccaagcgtcttcag

SEQ ID NO: 2506 - DNA, 20 bp, Artificial
  Synthetically generated peptide
cccttccccaagcgtcttca

SEQ ID NO: 2507 - DNA, 20 bp, Artificial
  Synthetically generated peptide
tcccttccccaagcgtcttc

SEQ ID NO: 2508 - DNA, 20 bp, Artificial
  Synthetically generated peptide
ttcccttccccaagcgtctt

SEQ ID NO: 2509 - DNA, 20 bp, Artificial
  Synthetically generated peptide
gttcccttccccaagcgtct

SEQ ID NO: 2510 - DNA, 20 bp, Artificial
  Synthetically generated peptide
ggttcccttccccaagcgtc

SEQ ID NO: 2511 - DNA, 20 bp, Artificial
  Synthetically generated peptide
gggttcccttccccaagcgt

SEQ ID NO: 2512 - DNA, 20 bp, Artificial
  Synthetically generated peptide
tgggttcccttccccaagcg

SEQ ID NO: 2513 - DNA, 28 bp, Artificial
  Synthetically generated peptide
caccggaagcttcagccagcgctcgctg

SEQ ID NO: 2514 - DNA, 20 bp, Artificial
  Synthetically generated peptide
accggaagcttcagccagcg

SEQ ID NO: 2515 - DNA, 20 bp, Artificial
  Synthetically generated peptide
ccggaagcttcagccagcgc

SEQ ID NO: 2516 - DNA, 20 bp, Artificial
  Synthetically generated peptide
cggaagcttcagccagcgct

SEQ ID NO: 2517 - DNA, 20 bp, Artificial
  Synthetically generated peptide
ggaagcttcagccagcgctc

SEQ ID NO: 2518 - DNA, 20 bp, Artificial
  Synthetically generated peptide
gaagcttcagccagcgctcg

SEQ ID NO: 2519 - DNA, 20 bp, Artificial
  Synthetically generated peptide
aagcttcagccagcgctcgc

SEQ ID NO: 2520 - DNA, 20 bp, Artificial
  Synthetically generated peptide
agcttcagccagcgctcgct

SEQ ID NO: 2521 - DNA, 20 bp, Artificial
  Synthetically generated peptide
gcttcagccagcgctcgctg

SEQ ID NO: 2522 - DNA, 20 bp, Artificial
  Synthetically generated peptide
cttcagccagcgctcgctgc

SEQ ID NO: 2523 - DNA, 20 bp, Artificial
  Synthetically generated peptide
ttcagccagcgctcgctgcc

SEQ ID NO: 2524 - DNA, 20 bp, Artificial
  Synthetically generated peptide
tcagccagcgctcgctgcct

SEQ ID NO: 2525 - DNA, 20 bp, Artificial
  Synthetically generated peptide
cagccagcgctcgctgcctc

SEQ ID NO: 2526 - DNA, 20 bp, Artificial
  Synthetically generated peptide
agccagcgctcgctgcctct

SEQ ID NO: 2527 - DNA, 20 bp, Artificial
  Synthetically generated peptide
gccagcgctcgctgcctctg

SEQ ID NO: 2528 - DNA, 20 bp, Artificial
  Synthetically generated peptide
ccagcgctcgctgcctctgc

SEQ ID NO: 2529 - DNA, 20 bp, Artificial
  Synthetically generated peptide
cagcgctcgctgcctctgcc

SEQ ID NO: 2530 - DNA, 20 bp, Artificial
  Synthetically generated peptide
agcgctcgctgcctctgccc

SEQ ID NO: 2531 - DNA, 20 bp, Artificial
  Synthetically generated peptide
gcgctcgctgcctctgccca

SEQ ID NO: 2532 - DNA, 20 bp, Artificial
  Synthetically generated peptide
cgctcgctgcctctgcccag

SEQ ID NO: 2533 - DNA, 20 bp, Artificial
  Synthetically generated peptide
gctcgctgcctctgcccagc

SEQ ID NO: 2534 - DNA, 20 bp, Artificial
  Synthetically generated peptide
ctcgctgcctctgcccagct

SEQ ID NO: 2535 - DNA, 20 bp, Artificial
  Synthetically generated peptide
tcgctgcctctgcccagctg

SEQ ID NO: 2536 - DNA, 20 bp, Artificial
  Synthetically generated peptide
cgctgcctctgcccagctgg

SEQ ID NO: 2537 - DNA, 20 bp, Artificial
  Synthetically generated peptide
ccaccggaagcttcagccag

SEQ ID NO: 2538 - DNA, 20 bp, Artificial
  Synthetically generated peptide
cccaccggaagcttcagcca

SEQ ID NO: 2539 - DNA, 20 bp, Artificial
  Synthetically generated peptide
tcccaccggaagcttcagcc

SEQ ID NO: 2540 - DNA, 20 bp, Artificial
  Synthetically generated peptide
ttcccaccggaagcttcagc

SEQ ID NO: 2541 - DNA, 20 bp, Artificial
  Synthetically generated peptide
tttcccaccggaagcttcag

SEQ ID NO: 2542 - DNA, 20 bp, Artificial
  Synthetically generated peptide
atttcccaccggaagcttca

SEQ ID NO: 2543 - DNA, 20 bp, Artificial
  Synthetically generated peptide
catttcccaccggaagcttc

SEQ ID NO: 2544 - DNA, 20 bp, Artificial
  Synthetically generated peptide
ccatttcccaccggaagctt

SEQ ID NO: 2545 - DNA, 20 bp, Artificial
  Synthetically generated peptide
cccatttcccaccggaagct

SEQ ID NO: 2546 - DNA, 20 bp, Artificial
  Synthetically generated peptide
gcccatttcccaccggaagc

SEQ ID NO: 2547 - DNA, 20 bp, Artificial
  Synthetically generated peptide
tgcccatttcccaccggaag

SEQ ID NO: 2548 - DNA, 20 bp, Artificial
  Synthetically generated peptide
ctgcccatttcccaccggaa

SEQ ID NO: 2549 - DNA, 20 bp, Artificial
  Synthetically generated peptide
actgcccatttcccaccgga

SEQ ID NO: 2550 - DNA, 20 bp, Artificial
  Synthetically generated peptide
cactgcccatttcccaccgg

SEQ ID NO: 2551 - DNA, 20 bp, Artificial
  Synthetically generated peptide
gcactgcccatttcccaccg

SEQ ID NO: 2552 - DNA, 28 bp, Artificial
  Synthetically generated peptide
cgagtgggaggcggccaggagcaagccg

SEQ ID NO: 2553 - DNA, 26 bp, Artificial
  Synthetically generated peptide
cgtacactcacggaaatgctgtaaag

SEQ ID NO: 2554 - DNA, 20 bp, Artificial
  Synthetically generated peptide
gtacactcacggaaatgctg

SEQ ID NO: 2555 - DNA, 20 bp, Artificial
  Synthetically generated peptide
tacactcacggaaatgctgt

SEQ ID NO: 2556 - DNA, 20 bp, Artificial
  Synthetically generated peptide
acactcacggaaatgctgta

SEQ ID NO: 2557 - DNA, 20 bp, Artificial
  Synthetically generated peptide
cactcacggaaatgctgtaa

SEQ ID NO: 2558 - DNA, 20 bp, Artificial
  Synthetically generated peptide
gcgtacactcacggaaatgc

SEQ ID NO: 2559 - DNA, 20 bp, Artificial
  Synthetically generated peptide
tgcgtacactcacggaaatg

SEQ ID NO: 2560 - DNA, 20 bp, Artificial
  Synthetically generated peptide
ttgcgtacactcacggaaat

SEQ ID NO: 2561 - DNA, 20 bp, Artificial
  Synthetically generated peptide
cttgcgtacactcacggaaa

SEQ ID NO: 2562 - DNA, 20 bp, Artificial
  Synthetically generated peptide
acttgcgtacactcacggaa

SEQ ID NO: 2563 - DNA, 20 bp, Artificial
  Synthetically generated peptide
gacttgcgtacactcacgga

SEQ ID NO: 2564 - DNA, 20 bp, Artificial
  Synthetically generated peptide
tgacttgcgtacactcacgg

SEQ ID NO: 2565 - DNA, 20 bp, Artificial
  Synthetically generated peptide
ctgacttgcgtacactcacg

SEQ ID NO: 2566 - DNA, 20 bp, Artificial
  Synthetically generated peptide
gctgacttgcgtacactcac

SEQ ID NO: 2567 - DNA, 20 bp, Artificial
  Synthetically generated peptide
agctgacttgcgtacactca

SEQ ID NO: 2568 - DNA, 20 bp, Artificial
  Synthetically generated peptide
gagctgacttgcgtacactc

SEQ ID NO: 2569 - DNA, 20 bp, Artificial
  Synthetically generated peptide
tgagctgacttgcgtacact

SEQ ID NO: 2570 - DNA, 20 bp, Artificial
  Synthetically generated peptide
ttgagctgacttgcgtacac

SEQ ID NO: 2571 - DNA, 20 bp, Artificial
  Synthetically generated peptide
gttgagctgacttgcgtaca

SEQ ID NO: 2572 - DNA, 20 bp, Artificial
  Synthetically generated peptide
tgttgagctgacttgcgtac

SEQ ID NO: 2573 - DNA, 20 bp, Artificial
  Synthetically generated peptide
ttgttgagctgacttgcgta

SEQ ID NO: 2574 - DNA, 20 bp, Artificial
  Synthetically generated peptide
attgttgagctgacttgcgt

SEQ ID NO: 2575 - DNA, 20 bp, Artificial
  Synthetically generated peptide
aattgttgagctgacttgcg

SEQ ID NO: 2576 - DNA, 26 bp, Artificial
  Synthetically generated peptide
cgtcacagccaataatgagcgtacgc

SEQ ID NO: 2577 - DNA, 20 bp, Artificial
  Synthetically generated peptide
gtcacagccaataatgagcg

SEQ ID NO: 2578 - DNA, 20 bp, Artificial
  Synthetically generated peptide
tcacagccaataatgagcgt

SEQ ID NO: 2579 - DNA, 20 bp, Artificial
  Synthetically generated peptide
cacagccaataatgagcgta

SEQ ID NO: 2580 - DNA, 20 bp, Artificial
  Synthetically generated peptide
acagccaataatgagcgtac

SEQ ID NO: 2581 - DNA, 20 bp, Artificial
  Synthetically generated peptide
cagccaataatgagcgtacg

SEQ ID NO: 2582 - DNA, 20 bp, Artificial
  Synthetically generated peptide
agccaataatgagcgtacgc

SEQ ID NO: 2583 - DNA, 20 bp, Artificial
  Synthetically generated peptide
gccaataatgagcgtacgca

SEQ ID NO: 2584 - DNA, 20 bp, Artificial
  Synthetically generated peptide
ccaataatgagcgtacgcaa

SEQ ID NO: 2585 - DNA, 20 bp, Artificial
  Synthetically generated peptide
acgtcacagccaataatgag

SEQ ID NO: 2586 - DNA, 20 bp, Artificial
  Synthetically generated peptide
gacgtcacagccaataatga

SEQ ID NO: 2587 - DNA, 20 bp, Artificial
  Synthetically generated peptide
agacgtcacagccaataatg

SEQ ID NO: 2588 - DNA, 20 bp, Artificial
  Synthetically generated peptide
cagacgtcacagccaataat

SEQ ID NO: 2589 - DNA, 20 bp, Artificial
  Synthetically generated peptide
tcagacgtcacagccaataa

SEQ ID NO: 2590 - DNA, 20 bp, Artificial
  Synthetically generated peptide
atcagacgtcacagccaata

SEQ ID NO: 2591 - DNA, 20 bp, Artificial
  Synthetically generated peptide
aatcagacgtcacagccaat

SEQ ID NO: 2592 - DNA, 20 bp, Artificial
  Synthetically generated peptide
taatcagacgtcacagccaa

SEQ ID NO: 2593 - DNA, 20 bp, Artificial
  Synthetically generated peptide
ataatcagacgtcacagcca

SEQ ID NO: 2594 - DNA, 20 bp, Artificial
  Synthetically generated peptide
cataatcagacgtcacagcc

SEQ ID NO: 2595 - DNA, 20 bp, Artificial
  Synthetically generated peptide
gcataatcagacgtcacagc

SEQ ID NO: 2596 - DNA, 20 bp, Artificial
  Synthetically generated peptide
ggcataatcagacgtcacag

SEQ ID NO: 2597 - DNA, 20 bp, Artificial
  Synthetically generated peptide
gggcataatcagacgtcaca

SEQ ID NO: 2598 - DNA, 20 bp, Artificial
  Synthetically generated peptide
agggcataatcagacgtcac

SEQ ID NO: 2599 - DNA, 20 bp, Artificial
  Synthetically generated peptide
aagggcataatcagacgtca

SEQ ID NO: 2600 - DNA, 20 bp, Artificial
  Synthetically generated peptide
gaagggcataatcagacgtc

SEQ ID NO: 2601 - DNA, 27 bp, Artificial
  Synthetically generated peptide
cttgtttgtatccgcatggctgtgctc

SEQ ID NO: 2602 - DNA, 20 bp, Artificial
  Synthetically generated peptide
ttgtttgtatccgcatggct

SEQ ID NO: 2603 - DNA, 20 bp, Artificial
  Synthetically generated peptide
tgtttgtatccgcatggctg

SEQ ID NO: 2604 - DNA, 20 bp, Artificial
  Synthetically generated peptide
gtttgtatccgcatggctgt

SEQ ID NO: 2605 - DNA, 20 bp, Artificial
  Synthetically generated peptide
tttgtatccgcatggctgtg

SEQ ID NO: 2606 - DNA, 20 bp, Artificial
  Synthetically generated peptide
ttgtatccgcatggctgtgc

SEQ ID NO: 2607 - DNA, 20 bp, Artificial
  Synthetically generated peptide
tgtatccgcatggctgtgct

SEQ ID NO: 2608 - DNA, 20 bp, Artificial
  Synthetically generated peptide
gtatccgcatggctgtgctc

SEQ ID NO: 2609 - DNA, 20 bp, Artificial
  Synthetically generated peptide
tatccgcatggctgtgctcc

SEQ ID NO: 2610 - DNA, 20 bp, Artificial
  Synthetically generated peptide
atccgcatggctgtgctcct

SEQ ID NO: 2611 - DNA, 20 bp, Artificial
  Synthetically generated peptide
tccgcatggctgtgctcctg

SEQ ID NO: 2612 - DNA, 20 bp, Artificial
  Synthetically generated peptide
ccgcatggctgtgctcctga

SEQ ID NO: 2613 - DNA, 20 bp, Artificial
  Synthetically generated peptide
cgcatggctgtgctcctgag

SEQ ID NO: 2614 - DNA, 20 bp, Artificial
  Synthetically generated peptide
gcttgtttgtatccgcatgg

SEQ ID NO: 2615 - DNA, 20 bp, Artificial
  Synthetically generated peptide
tgcttgtttgtatccgcatg

SEQ ID NO: 2616 - DNA, 21 bp, Artificial
  Synthetically generated peptide
cgagaccgttgaggtggagtg

SEQ ID NO: 2617 - DNA, 20 bp, Artificial
  Synthetically generated peptide
ccgagaccgttgaggtggag

SEQ ID NO: 2618 - DNA, 20 bp, Artificial
  Synthetically generated peptide
tccgagaccgttgaggtgga

SEQ ID NO: 2619 - DNA, 20 bp, Artificial
  Synthetically generated peptide
atccgagaccgttgaggtgg

SEQ ID NO: 2620 - DNA, 20 bp, Artificial
  Synthetically generated peptide
aatccgagaccgttgaggtg

SEQ ID NO: 2621 - DNA, 20 bp, Artificial
  Synthetically generated peptide
caatccgagaccgttgaggt

SEQ ID NO: 2622 - DNA, 20 bp, Artificial
  Synthetically generated peptide
tcaatccgagaccgttgagg

SEQ ID NO: 2623 - DNA, 20 bp, Artificial
  Synthetically generated peptide
ttcaatccgagaccgttgag

SEQ ID NO: 2624 - DNA, 20 bp, Artificial
  Synthetically generated peptide
tttcaatccgagaccgttga

SEQ ID NO: 2625 - DNA, 20 bp, Artificial
  Synthetically generated peptide
gtttcaatccgagaccgttg

SEQ ID NO: 2626 - DNA, 20 bp, Artificial
  Synthetically generated peptide
ggtttcaatccgagaccgtt

SEQ ID NO: 2627 - DNA, 20 bp, Artificial
  Synthetically generated peptide
aggtttcaatccgagaccgt

SEQ ID NO: 2628 - DNA, 20 bp, Artificial
  Synthetically generated peptide
caggtttcaatccgagaccg

SEQ ID NO: 2629 - DNA, 20 bp, Artificial
  Synthetically generated peptide
tcaggtttcaatccgagacc

SEQ ID NO: 2630 - DNA, 20 bp, Artificial
  Synthetically generated peptide
ctcaggtttcaatccgagac

SEQ ID NO: 2631 - DNA, 20 bp, Artificial
  Synthetically generated peptide
actcaggtttcaatccgaga

SEQ ID NO: 2632 - DNA, 20 bp, Artificial
  Synthetically generated peptide
gactcaggtttcaatccgag

SEQ ID NO: 2633 - DNA, 20 bp, Artificial
  Synthetically generated peptide
tgactcaggtttcaatccga

SEQ ID NO: 2634 - DNA, 20 bp, Artificial
  Synthetically generated peptide
ctgactcaggtttcaatccg

SEQ ID NO: 2635 - DNA, 22 bp, Artificial
  Synthetically generated peptide
ggtcacttacgtggcgtgtcgc

SEQ ID NO: 2636 - DNA, 20 bp, Artificial
  Synthetically generated peptide
gtcacttacgtggcgtgtcg

SEQ ID NO: 2637 - DNA, 20 bp, Artificial
  Synthetically generated peptide
tcacttacgtggcgtgtcgc

SEQ ID NO: 2638 - DNA, 20 bp, Artificial
  Synthetically generated peptide
cacttacgtggcgtgtcgca

SEQ ID NO: 2639 - DNA, 20 bp, Artificial
  Synthetically generated peptide
acttacgtggcgtgtcgcag

SEQ ID NO: 2640 - DNA, 20 bp, Artificial
  Synthetically generated peptide
cttacgtggcgtgtcgcagt

SEQ ID NO: 2641 - DNA, 20 bp, Artificial
  Synthetically generated peptide
ttacgtggcgtgtcgcagtg

SEQ ID NO: 2642 - DNA, 20 bp, Artificial
  Synthetically generated peptide
tacgtggcgtgtcgcagtgg

SEQ ID NO: 2643 - DNA, 20 bp, Artificial
  Synthetically generated peptide
acgtggcgtgtcgcagtggg

SEQ ID NO: 2644 - DNA, 20 bp, Artificial
  Synthetically generated peptide
cgtggcgtgtcgcagtgggt

SEQ ID NO: 2645 - DNA, 20 bp, Artificial
  Synthetically generated peptide
gtggcgtgtcgcagtgggtt

SEQ ID NO: 2646 - DNA, 20 bp, Artificial
  Synthetically generated peptide
tggcgtgtcgcagtgggttc

SEQ ID NO: 2647 - DNA, 20 bp, Artificial
  Synthetically generated peptide
ggcgtgtcgcagtgggttca

SEQ ID NO: 2648 - DNA, 20 bp, Artificial
  Synthetically generated peptide
gcgtgtcgcagtgggttcag

SEQ ID NO: 2649 - DNA, 20 bp, Artificial
  Synthetically generated peptide
cgtgtcgcagtgggttcagg

SEQ ID NO: 2650 - DNA, 20 bp, Artificial
  Synthetically generated peptide
gtgtcgcagtgggttcaggg

SEQ ID NO: 2651 - DNA, 20 bp, Artificial
  Synthetically generated peptide
tgtcgcagtgggttcagggg

SEQ ID NO: 2652 - DNA, 20 bp, Artificial
  Synthetically generated peptide
gtcgcagtgggttcaggggt

SEQ ID NO: 2653 - DNA, 20 bp, Artificial
  Synthetically generated peptide
tcgcagtgggttcaggggtg

SEQ ID NO: 2654 - DNA, 20 bp, Artificial
  Synthetically generated peptide
cgcagtgggttcaggggtga

SEQ ID NO: 2655 - DNA, 20 bp, Artificial
  Synthetically generated peptide
tggtcacttacgtggcgtgt

SEQ ID NO: 2656 - DNA, 20 bp, Artificial
  Synthetically generated peptide
gtggtcacttacgtggcgtg

SEQ ID NO: 2657 - DNA, 20 bp, Artificial
  Synthetically generated peptide
tgtggtcacttacgtggcgt

SEQ ID NO: 2658 - DNA, 20 bp, Artificial
  Synthetically generated peptide
ctgtggtcacttacgtggcg

SEQ ID NO: 2659 - DNA, 20 bp, Artificial
  Synthetically generated peptide
tctgtggtcacttacgtggc

SEQ ID NO: 2660 - DNA, 20 bp, Artificial
  Synthetically generated peptide
ttctgtggtcacttacgtgg

SEQ ID NO: 2661 - DNA, 20 bp, Artificial
  Synthetically generated peptide
cttctgtggtcacttacgtg

SEQ ID NO: 2662 - DNA, 20 bp, Artificial
  Synthetically generated peptide
ccttctgtggtcacttacgt

SEQ ID NO: 2663 - DNA, 20 bp, Artificial
  Synthetically generated peptide
tccttctgtggtcacttacg

SEQ ID NO: 2664 - DNA, 20 bp, Artificial
  Synthetically generated peptide
gacaaaatgtagcgctatcg

SEQ ID NO: 2665 - DNA, 20 bp, Artificial
  Synthetically generated peptide
ggacaaaatgtagcgctatc

SEQ ID NO: 2666 - DNA, 22 bp, Artificial
  Synthetically generated peptide
gctccctggccccgcgcgtcgc

SEQ ID NO: 2667 - DNA, 20 bp, Artificial
  Synthetically generated peptide
ctccctggccccgcgcgtcg

SEQ ID NO: 2668 - DNA, 20 bp, Artificial
  Synthetically generated peptide
tccctggccccgcgcgtcgc

SEQ ID NO: 2669 - DNA, 20 bp, Artificial
  Synthetically generated peptide
ccctggccccgcgcgtcgcc

SEQ ID NO: 2670 - DNA, 20 bp, Artificial
  Synthetically generated peptide
cctggccccgcgcgtcgccc

SEQ ID NO: 2671 - DNA, 20 bp, Artificial
  Synthetically generated peptide
ctggccccgcgcgtcgcccg

SEQ ID NO: 2672 - DNA, 20 bp, Artificial
  Synthetically generated peptide
tggccccgcgcgtcgcccgg

SEQ ID NO: 2673 - DNA, 20 bp, Artificial
  Synthetically generated peptide
ggccccgcgcgtcgcccggg

SEQ ID NO: 2674 - DNA, 20 bp, Artificial
  Synthetically generated peptide
gccccgcgcgtcgcccgggg

SEQ ID NO: 2675 - DNA, 20 bp, Artificial
  Synthetically generated peptide
ccccgcgcgtcgcccggggg

SEQ ID NO: 2676 - DNA, 20 bp, Artificial
  Synthetically generated peptide
cccgcgcgtcgcccgggggt

SEQ ID NO: 2677 - DNA, 20 bp, Artificial
  Synthetically generated peptide
ccgcgcgtcgcccgggggtc

SEQ ID NO: 2678 - DNA, 20 bp, Artificial
  Synthetically generated peptide
cgcgcgtcgcccgggggtcg

SEQ ID NO: 2679 - DNA, 20 bp, Artificial
  Synthetically generated peptide
gcgcgtcgcccgggggtcgc

SEQ ID NO: 2680 - DNA, 20 bp, Artificial
  Synthetically generated peptide
cgcgtcgcccgggggtcgct

SEQ ID NO: 2681 - DNA, 20 bp, Artificial
  Synthetically generated peptide
gcgtcgcccgggggtcgctg

SEQ ID NO: 2682 - DNA, 20 bp, Artificial
  Synthetically generated peptide
cgtcgcccgggggtcgctgg

SEQ ID NO: 2683 - DNA, 20 bp, Artificial
  Synthetically generated peptide
gtcgcccgggggtcgctggc

SEQ ID NO: 2684 - DNA, 20 bp, Artificial
  Synthetically generated peptide
tcgcccgggggtcgctggct

SEQ ID NO: 2685 - DNA, 20 bp, Artificial
  Synthetically generated peptide
cgcccgggggtcgctggctc

SEQ ID NO: 2686 - DNA, 20 bp, Artificial
  Synthetically generated peptide
gcccgggggtcgctggctcg

SEQ ID NO: 2687 - DNA, 20 bp, Artificial
  Synthetically generated peptide
cccgggggtcgctggctcgg

SEQ ID NO: 2688 - DNA, 20 bp, Artificial
  Synthetically generated peptide
ccgggggtcgctggctcggt

SEQ ID NO: 2689 - DNA, 20 bp, Artificial
  Synthetically generated peptide
cgggggtcgctggctcggtg

SEQ ID NO: 2690 - DNA, 20 bp, Artificial
  Synthetically generated peptide
gggggtcgctggctcggtgc

SEQ ID NO: 2691 - DNA, 20 bp, Artificial
  Synthetically generated peptide
ggggtcgctggctcggtgcg

SEQ ID NO: 2692 - DNA, 20 bp, Artificial
  Synthetically generated peptide
gggtcgctggctcggtgcgt

SEQ ID NO: 2693 - DNA, 20 bp, Artificial
  Synthetically generated peptide
ggtcgctggctcggtgcgtg

SEQ ID NO: 2694 - DNA, 20 bp, Artificial
  Synthetically generated peptide
gtcgctggctcggtgcgtgt

SEQ ID NO: 2695 - DNA, 20 bp, Artificial
  Synthetically generated peptide
tcgctggctcggtgcgtgtg

SEQ ID NO: 2696 - DNA, 20 bp, Artificial
  Synthetically generated peptide
cgctggctcggtgcgtgtgg

SEQ ID NO: 2697 - DNA, 20 bp, Artificial
  Synthetically generated peptide
gctggctcggtgcgtgtggc

SEQ ID NO: 2698 - DNA, 20 bp, Artificial
  Synthetically generated peptide
ctggctcggtgcgtgtggcc

SEQ ID NO: 2699 - DNA, 20 bp, Artificial
  Synthetically generated peptide
tggctcggtgcgtgtggccg

SEQ ID NO: 2700 - DNA, 20 bp, Artificial
  Synthetically generated peptide
ggctcggtgcgtgtggccgc

SEQ ID NO: 2701 - DNA, 20 bp, Artificial
  Synthetically generated peptide
gctcggtgcgtgtggccgcc

SEQ ID NO: 2702 - DNA, 20 bp, Artificial
  Synthetically generated peptide
ctcggtgcgtgtggccgcct

SEQ ID NO: 2703 - DNA, 20 bp, Artificial
  Synthetically generated peptide
tcggtgcgtgtggccgcctc

SEQ ID NO: 2704 - DNA, 20 bp, Artificial
  Synthetically generated peptide
cggtgcgtgtggccgcctcg

SEQ ID NO: 2705 - DNA, 20 bp, Artificial
  Synthetically generated peptide
ggtgcgtgtggccgcctcgc

SEQ ID NO: 2706 - DNA, 20 bp, Artificial
  Synthetically generated peptide
gtgcgtgtggccgcctcgcc

SEQ ID NO: 2707 - DNA, 20 bp, Artificial
  Synthetically generated peptide
tgcgtgtggccgcctcgccg

SEQ ID NO: 2708 - DNA, 20 bp, Artificial
  Synthetically generated peptide
gcgtgtggccgcctcgccgc

SEQ ID NO: 2709 - DNA, 20 bp, Artificial
  Synthetically generated peptide
cgtgtggccgcctcgccgcc

SEQ ID NO: 2710 - DNA, 20 bp, Artificial
  Synthetically generated peptide
gtgtggccgcctcgccgcct

SEQ ID NO: 2711 - DNA, 20 bp, Artificial
  Synthetically generated peptide
tgtggccgcctcgccgcctg

SEQ ID NO: 2712 - DNA, 20 bp, Artificial
  Synthetically generated peptide
gtggccgcctcgccgcctgg

SEQ ID NO: 2713 - DNA, 20 bp, Artificial
  Synthetically generated peptide
tggccgcctcgccgcctggt

SEQ ID NO: 2714 - DNA, 20 bp, Artificial
  Synthetically generated peptide
ggccgcctcgccgcctggtt

SEQ ID NO: 2715 - DNA, 20 bp, Artificial
  Synthetically generated peptide
gccgcctcgccgcctggttg

SEQ ID NO: 2716 - DNA, 20 bp, Artificial
  Synthetically generated peptide
ccgcctcgccgcctggttgg

SEQ ID NO: 2717 - DNA, 20 bp, Artificial
  Synthetically generated peptide
cgcctcgccgcctggttgga

SEQ ID NO: 2718 - DNA, 20 bp, Artificial
  Synthetically generated peptide
gcctcgccgcctggttggag

SEQ ID NO: 2719 - DNA, 20 bp, Artificial
  Synthetically generated peptide
cctcgccgcctggttggagc

SEQ ID NO: 2720 - DNA, 20 bp, Artificial
  Synthetically generated peptide
ctcgccgcctggttggagcc

SEQ ID NO: 2721 - DNA, 20 bp, Artificial
  Synthetically generated peptide
tcgccgcctggttggagcct

SEQ ID NO: 2722 - DNA, 20 bp, Artificial
  Synthetically generated peptide
cgccgcctggttggagcctg

SEQ ID NO: 2723 - DNA, 20 bp, Artificial
  Synthetically generated peptide
gccgcctggttggagcctgc

SEQ ID NO: 2724 - DNA, 20 bp, Artificial
  Synthetically generated peptide
ccgcctggttggagcctgct

SEQ ID NO: 2725 - DNA, 20 bp, Artificial
  Synthetically generated peptide
cgcctggttggagcctgctc

SEQ ID NO: 2726 - DNA, 20 bp, Artificial
  Synthetically generated peptide
cgctccctggccccgcgcgt

SEQ ID NO: 2727 - DNA, 20 bp, Artificial
  Synthetically generated peptide
gcgctccctggccccgcgcg

SEQ ID NO: 2728 - DNA, 20 bp, Artificial
  Synthetically generated peptide
agcgctccctggccccgcgc

SEQ ID NO: 2729 - DNA, 20 bp, Artificial
  Synthetically generated peptide
tagcgctccctggccccgcg

SEQ ID NO: 2730 - DNA, 20 bp, Artificial
  Synthetically generated peptide
gtagcgctccctggccccgc

SEQ ID NO: 2731 - DNA, 20 bp, Artificial
  Synthetically generated peptide
cgtagcgctccctggccccg

SEQ ID NO: 2732 - DNA, 25 bp, Artificial
  Synthetically generated peptide
ccgcggcgcagggctgcgctccgag

SEQ ID NO: 2733 - DNA, 20 bp, Artificial
  Synthetically generated peptide
cgcggcgcagggctgcgctc

SEQ ID NO: 2734 - DNA, 20 bp, Artificial
  Synthetically generated peptide
gcggcgcagggctgcgctcc

SEQ ID NO: 2735 - DNA, 20 bp, Artificial
  Synthetically generated peptide
cggcgcagggctgcgctccg

SEQ ID NO: 2736 - DNA, 20 bp, Artificial
  Synthetically generated peptide
ggcgcagggctgcgctccga

SEQ ID NO: 2737 - DNA, 20 bp, Artificial
  Synthetically generated peptide
gcgcagggctgcgctccgag

SEQ ID NO: 2738 - DNA, 20 bp, Artificial
  Synthetically generated peptide
cgcagggctgcgctccgagg

SEQ ID NO: 2739 - DNA, 20 bp, Artificial
  Synthetically generated peptide
gcagggctgcgctccgaggg

SEQ ID NO: 2740 - DNA, 20 bp, Artificial
  Synthetically generated peptide
cagggctgcgctccgagggt

SEQ ID NO: 2741 - DNA, 20 bp, Artificial
  Synthetically generated peptide
agggctgcgctccgagggtc

SEQ ID NO: 2742 - DNA, 20 bp, Artificial
  Synthetically generated peptide
gggctgcgctccgagggtcc

SEQ ID NO: 2743 - DNA, 20 bp, Artificial
  Synthetically generated peptide
ggctgcgctccgagggtccg

SEQ ID NO: 2744 - DNA, 20 bp, Artificial
  Synthetically generated peptide
gctgcgctccgagggtccgc

SEQ ID NO: 2745 - DNA, 20 bp, Artificial
  Synthetically generated peptide
ctgcgctccgagggtccgct

SEQ ID NO: 2746 - DNA, 20 bp, Artificial
  Synthetically generated peptide
tgcgctccgagggtccgctg

SEQ ID NO: 2747 - DNA, 20 bp, Artificial
  Synthetically generated peptide
gcgctccgagggtccgctgg

SEQ ID NO: 2748 - DNA, 20 bp, Artificial
  Synthetically generated peptide
cgctccgagggtccgctggc

SEQ ID NO: 2749 - DNA, 20 bp, Artificial
  Synthetically generated peptide
gctccgagggtccgctggct

SEQ ID NO: 2750 - DNA, 20 bp, Artificial
  Synthetically generated peptide
ctccgagggtccgctggctc

SEQ ID NO: 2751 - DNA, 20 bp, Artificial
  Synthetically generated peptide
tccgagggtccgctggctcg

SEQ ID NO: 2752 - DNA, 20 bp, Artificial
  Synthetically generated peptide
ccgagggtccgctggctcgg

SEQ ID NO: 2753 - DNA, 20 bp, Artificial
  Synthetically generated peptide
cgagggtccgctggctcggt

SEQ ID NO: 2754 - DNA, 20 bp, Artificial
  Synthetically generated peptide
gagggtccgctggctcggtg

SEQ ID NO: 2755 - DNA, 20 bp, Artificial
  Synthetically generated peptide
agggtccgctggctcggtgg

SEQ ID NO: 2756 - DNA, 20 bp, Artificial
  Synthetically generated peptide
gggtccgctggctcggtggc

SEQ ID NO: 2757 - DNA, 20 bp, Artificial
  Synthetically generated peptide
ggtccgctggctcggtggcc

SEQ ID NO: 2758 - DNA, 20 bp, Artificial
  Synthetically generated peptide
gtccgctggctcggtggcct

SEQ ID NO: 2759 - DNA, 20 bp, Artificial
  Synthetically generated peptide
tccgctggctcggtggcctg

SEQ ID NO: 2760 - DNA, 20 bp, Artificial
  Synthetically generated peptide
ccgctggctcggtggcctgg

SEQ ID NO: 2761 - DNA, 20 bp, Artificial
  Synthetically generated peptide
cgctggctcggtggcctggg

SEQ ID NO: 2762 - DNA, 20 bp, Artificial
  Synthetically generated peptide
gctggctcggtggcctgggg

SEQ ID NO: 2763 - DNA, 20 bp, Artificial
  Synthetically generated peptide
ctggctcggtggcctggggt

SEQ ID NO: 2764 - DNA, 20 bp, Artificial
  Synthetically generated peptide
tggctcggtggcctggggtt

SEQ ID NO: 2765 - DNA, 20 bp, Artificial
  Synthetically generated peptide
ggctcggtggcctggggttt

SEQ ID NO: 2766 - DNA, 20 bp, Artificial
  Synthetically generated peptide
gctcggtggcctggggtttg

SEQ ID NO: 2767 - DNA, 20 bp, Artificial
  Synthetically generated peptide
ctcggtggcctggggtttgc

SEQ ID NO: 2768 - DNA, 20 bp, Artificial
  Synthetically generated peptide
tcggtggcctggggtttgcc

SEQ ID NO: 2769 - DNA, 20 bp, Artificial
  Synthetically generated peptide
cggtggcctggggtttgccc

SEQ ID NO: 2770 - DNA, 20 bp, Artificial
  Synthetically generated peptide
ggtggcctggggtttgcccg

SEQ ID NO: 2771 - DNA, 20 bp, Artificial
  Synthetically generated peptide
gtggcctggggtttgcccgg

SEQ ID NO: 2772 - DNA, 20 bp, Artificial
  Synthetically generated peptide
tggcctggggtttgcccggc

SEQ ID NO: 2773 - DNA, 20 bp, Artificial
  Synthetically generated peptide
ggcctggggtttgcccggct

SEQ ID NO: 2774 - DNA, 20 bp, Artificial
  Synthetically generated peptide
gcctggggtttgcccggctc

SEQ ID NO: 2775 - DNA, 20 bp, Artificial
  Synthetically generated peptide
cctggggtttgcccggctca

SEQ ID NO: 2776 - DNA, 20 bp, Artificial
  Synthetically generated peptide
ctggggtttgcccggctcag

SEQ ID NO: 2777 - DNA, 20 bp, Artificial
  Synthetically generated peptide
tggggtttgcccggctcagc

SEQ ID NO: 2778 - DNA, 20 bp, Artificial
  Synthetically generated peptide
ggggtttgcccggctcagcg

SEQ ID NO: 2779 - DNA, 20 bp, Artificial
  Synthetically generated peptide
gggtttgcccggctcagcgg

SEQ ID NO: 2780 - DNA, 20 bp, Artificial
  Synthetically generated peptide
ggtttgcccggctcagcggc

SEQ ID NO: 2781 - DNA, 20 bp, Artificial
  Synthetically generated peptide
gtttgcccggctcagcggct

SEQ ID NO: 2782 - DNA, 20 bp, Artificial
  Synthetically generated peptide
tttgcccggctcagcggctc

SEQ ID NO: 2783 - DNA, 20 bp, Artificial
  Synthetically generated peptide
ttgcccggctcagcggctca

SEQ ID NO: 2784 - DNA, 20 bp, Artificial
  Synthetically generated peptide
tgcccggctcagcggctcat

SEQ ID NO: 2785 - DNA, 20 bp, Artificial
  Synthetically generated peptide
gcccggctcagcggctcatg

SEQ ID NO: 2786 - DNA, 20 bp, Artificial
  Synthetically generated peptide
cccggctcagcggctcatgg

SEQ ID NO: 2787 - DNA, 20 bp, Artificial
  Synthetically generated peptide
ccggctcagcggctcatggt

SEQ ID NO: 2788 - DNA, 20 bp, Artificial
  Synthetically generated peptide
cggctcagcggctcatggtc

SEQ ID NO: 2789 - DNA, 20 bp, Artificial
  Synthetically generated peptide
ggctcagcggctcatggtcc

SEQ ID NO: 2790 - DNA, 20 bp, Artificial
  Synthetically generated peptide
gctcagcggctcatggtccg

SEQ ID NO: 2791 - DNA, 20 bp, Artificial
  Synthetically generated peptide
ctcagcggctcatggtccgg

SEQ ID NO: 2792 - DNA, 20 bp, Artificial
  Synthetically generated peptide
tcagcggctcatggtccggc

SEQ ID NO: 2793 - DNA, 20 bp, Artificial
  Synthetically generated peptide
cagcggctcatggtccggcc

SEQ ID NO: 2794 - DNA, 20 bp, Artificial
  Synthetically generated peptide
agcggctcatggtccggccc

SEQ ID NO: 2795 - DNA, 20 bp, Artificial
  Synthetically generated peptide
gcggctcatggtccggcccc

SEQ ID NO: 2796 - DNA, 20 bp, Artificial
  Synthetically generated peptide
cggctcatggtccggccccc

SEQ ID NO: 2797 - DNA, 20 bp, Artificial
  Synthetically generated peptide
ggctcatggtccggcccccg

SEQ ID NO: 2798 - DNA, 20 bp, Artificial
  Synthetically generated peptide
gctcatggtccggcccccgc

SEQ ID NO: 2799 - DNA, 20 bp, Artificial
  Synthetically generated peptide
ctcatggtccggcccccgcg

SEQ ID NO: 2800 - DNA, 20 bp, Artificial
  Synthetically generated peptide
tcatggtccggcccccgcgc

SEQ ID NO: 2801 - DNA, 20 bp, Artificial
  Synthetically generated peptide
catggtccggcccccgcgcc

SEQ ID NO: 2802 - DNA, 20 bp, Artificial
  Synthetically generated peptide
atggtccggcccccgcgccc

SEQ ID NO: 2803 - DNA, 20 bp, Artificial
  Synthetically generated peptide
tggtccggcccccgcgcccc

SEQ ID NO: 2804 - DNA, 20 bp, Artificial
  Synthetically generated peptide
ggtccggcccccgcgcccca

SEQ ID NO: 2805 - DNA, 20 bp, Artificial
  Synthetically generated peptide
gtccggcccccgcgccccag

SEQ ID NO: 2806 - DNA, 20 bp, Artificial
  Synthetically generated peptide
tccggcccccgcgccccagc

SEQ ID NO: 2807 - DNA, 20 bp, Artificial
  Synthetically generated peptide
ccggcccccgcgccccagcc

SEQ ID NO: 2808 - DNA, 20 bp, Artificial
  Synthetically generated peptide
cggcccccgcgccccagccc

SEQ ID NO: 2809 - DNA, 20 bp, Artificial
  Synthetically generated peptide
ggcccccgcgccccagcccc

SEQ ID NO: 2810 - DNA, 20 bp, Artificial
  Synthetically generated peptide
gcccccgcgccccagccccc

SEQ ID NO: 2811 - DNA, 20 bp, Artificial
  Synthetically generated peptide
cccccgcgccccagcccccg

SEQ ID NO: 2812 - DNA, 20 bp, Artificial
  Synthetically generated peptide
ccccgcgccccagcccccgc

SEQ ID NO: 2813 - DNA, 20 bp, Artificial
  Synthetically generated peptide
cccgcgccccagcccccgcc

SEQ ID NO: 2814 - DNA, 20 bp, Artificial
  Synthetically generated peptide
ccgcgccccagcccccgccg

SEQ ID NO: 2815 - DNA, 20 bp, Artificial
  Synthetically generated peptide
cgcgccccagcccccgccgc

SEQ ID NO: 2816 - DNA, 20 bp, Artificial
  Synthetically generated peptide
gcgccccagcccccgccgcc

SEQ ID NO: 2817 - DNA, 20 bp, Artificial
  Synthetically generated peptide
cgccccagcccccgccgccg

SEQ ID NO: 2818 - DNA, 20 bp, Artificial
  Synthetically generated peptide
gccccagcccccgccgccgc

SEQ ID NO: 2819 - DNA, 20 bp, Artificial
  Synthetically generated peptide
ccccagcccccgccgccgcc

SEQ ID NO: 2820 - DNA, 20 bp, Artificial
  Synthetically generated peptide
cccagcccccgccgccgccg

SEQ ID NO: 2821 - DNA, 20 bp, Artificial
  Synthetically generated peptide
ccagcccccgccgccgccgc

SEQ ID NO: 2822 - DNA, 20 bp, Artificial
  Synthetically generated peptide
cagcccccgccgccgccgcc

SEQ ID NO: 2823 - DNA, 20 bp, Artificial
  Synthetically generated peptide
agcccccgccgccgccgccg

SEQ ID NO: 2824 - DNA, 20 bp, Artificial
  Synthetically generated peptide
gcccccgccgccgccgccgc

SEQ ID NO: 2825 - DNA, 20 bp, Artificial
  Synthetically generated peptide
cccccgccgccgccgccgcc

SEQ ID NO: 2826 - DNA, 20 bp, Artificial
  Synthetically generated peptide
ccccgccgccgccgccgccg

SEQ ID NO: 2827 - DNA, 20 bp, Artificial
  Synthetically generated peptide
cccgccgccgccgccgccgc

SEQ ID NO: 2828 - DNA, 20 bp, Artificial
  Synthetically generated peptide
ccgccgccgccgccgccgcc

SEQ ID NO: 2829 - DNA, 20 bp, Artificial
  Synthetically generated peptide
cgccgccgccgccgccgccg

SEQ ID NO: 2830 - DNA, 20 bp, Artificial
  Synthetically generated peptide
gccgccgccgccgccgccgc

SEQ ID NO: 2831 - DNA, 20 bp, Artificial
  Synthetically generated peptide
ccgccgccgccgccgccgca

SEQ ID NO: 2832 - DNA, 20 bp, Artificial
  Synthetically generated peptide
cgccgccgccgccgccgcag

SEQ ID NO: 2833 - DNA, 20 bp, Artificial
  Synthetically generated peptide
gccgccgccgccgccgcagg

SEQ ID NO: 2834 - DNA, 20 bp, Artificial
  Synthetically generated peptide
ccgccgccgccgccgcaggt

SEQ ID NO: 2835 - DNA, 20 bp, Artificial
  Synthetically generated peptide
cgccgccgccgccgcaggtc

SEQ ID NO: 2836 - DNA, 20 bp, Artificial
  Synthetically generated peptide
gccgccgccgccgcaggtcc

SEQ ID NO: 2837 - DNA, 20 bp, Artificial
  Synthetically generated peptide
ccgccgccgccgcaggtcct

SEQ ID NO: 2838 - DNA, 20 bp, Artificial
  Synthetically generated peptide
cgccgccgccgcaggtcctg

SEQ ID NO: 2839 - DNA, 20 bp, Artificial
  Synthetically generated peptide
gccgccgccgcaggtcctgg

SEQ ID NO: 2840 - DNA, 20 bp, Artificial
  Synthetically generated peptide
ccgccgccgcaggtcctggc

SEQ ID NO: 2841 - DNA, 20 bp, Artificial
  Synthetically generated peptide
cgccgccgcaggtcctggca

SEQ ID NO: 2842 - DNA, 20 bp, Artificial
  Synthetically generated peptide
gccgccgcaggtcctggcaa

SEQ ID NO: 2843 - DNA, 20 bp, Artificial
  Synthetically generated peptide
ccgccgcaggtcctggcaat

SEQ ID NO: 2844 - DNA, 20 bp, Artificial
  Synthetically generated peptide
cgccgcaggtcctggcaatc

SEQ ID NO: 2845 - DNA, 20 bp, Artificial
  Synthetically generated peptide
gccgcaggtcctggcaatcc

SEQ ID NO: 2846 - DNA, 20 bp, Artificial
  Synthetically generated peptide
ccgcaggtcctggcaatccc

SEQ ID NO: 2847 - DNA, 20 bp, Artificial
  Synthetically generated peptide
cgcaggtcctggcaatccct

SEQ ID NO: 2848 - DNA, 20 bp, Artificial
  Synthetically generated peptide
tccgcggcgcagggctgcgc

SEQ ID NO: 2849 - DNA, 20 bp, Artificial
  Synthetically generated peptide
ctccgcggcgcagggctgcg

SEQ ID NO: 2850 - DNA, 20 bp, Artificial
  Synthetically generated peptide
gctccgcggcgcagggctgc

SEQ ID NO: 2851 - DNA, 20 bp, Artificial
  Synthetically generated peptide
tgctccgcggcgcagggctg

SEQ ID NO: 2852 - DNA, 20 bp, Artificial
  Synthetically generated peptide
ctgctccgcggcgcagggct

SEQ ID NO: 2853 - DNA, 20 bp, Artificial
  Synthetically generated peptide
cctgctccgcggcgcagggc

SEQ ID NO: 2854 - DNA, 20 bp, Artificial
  Synthetically generated peptide
gcctgctccgcggcgcaggg

SEQ ID NO: 2855 - DNA, 20 bp, Artificial
  Synthetically generated peptide
agcctgctccgcggcgcagg

SEQ ID NO: 2856 - DNA, 20 bp, Artificial
  Synthetically generated peptide
gagcctgctccgcggcgcag

SEQ ID NO: 2857 - DNA, 20 bp, Artificial
  Synthetically generated peptide
ggagcctgctccgcggcgca

SEQ ID NO: 2858 - DNA, 20 bp, Artificial
  Synthetically generated peptide
tggagcctgctccgcggcgc

SEQ ID NO: 2859 - DNA, 20 bp, Artificial
  Synthetically generated peptide
ttggagcctgctccgcggcg

SEQ ID NO: 2860 - DNA, 20 bp, Artificial
  Synthetically generated peptide
gttggagcctgctccgcggc

SEQ ID NO: 2861 - DNA, 20 bp, Artificial
  Synthetically generated peptide
ggttggagcctgctccgcgg

SEQ ID NO: 2862 - DNA, 20 bp, Artificial
  Synthetically generated peptide
tggttggagcctgctccgcg

SEQ ID NO: 2863 - DNA, 20 bp, Artificial
  Synthetically generated peptide
ctggttggagcctgctccgc

SEQ ID NO: 2864 - DNA, 20 bp, Artificial
  Synthetically generated peptide
cctggttggagcctgctccg

SEQ ID NO: 2865 - DNA, 22 bp, Artificial
  Synthetically generated peptide
gccgcctgctactcctggcctc

SEQ ID NO: 2866 - DNA, 20 bp, Artificial
  Synthetically generated peptide
ccgcctgctactcctggcct

SEQ ID NO: 2867 - DNA, 20 bp, Artificial
  Synthetically generated peptide
cgcctgctactcctggcctc

SEQ ID NO: 2868 - DNA, 20 bp, Artificial
  Synthetically generated peptide
ggccgcctgctactcctggc

SEQ ID NO: 2869 - DNA, 28 bp, Artificial
  Synthetically generated peptide
gcgcactcgggcccgcccctctctgccc

SEQ ID NO: 2870 - DNA, 20 bp, Artificial
  Synthetically generated peptide
cgcactcgggcccgcccctc

SEQ ID NO: 2871 - DNA, 20 bp, Artificial
  Synthetically generated peptide
gcactcgggcccgcccctct

SEQ ID NO: 2872 - DNA, 20 bp, Artificial
  Synthetically generated peptide
cactcgggcccgcccctctc

SEQ ID NO: 2873 - DNA, 20 bp, Artificial
  Synthetically generated peptide
actcgggcccgcccctctct

SEQ ID NO: 2874 - DNA, 20 bp, Artificial
  Synthetically generated peptide
ctcgggcccgcccctctctg

SEQ ID NO: 2875 - DNA, 20 bp, Artificial
  Synthetically generated peptide
tcgggcccgcccctctctgc

SEQ ID NO: 2876 - DNA, 20 bp, Artificial
  Synthetically generated peptide
cgggcccgcccctctctgcc

SEQ ID NO: 2877 - DNA, 20 bp, Artificial
  Synthetically generated peptide
gggcccgcccctctctgccc

SEQ ID NO: 2878 - DNA, 20 bp, Artificial
  Synthetically generated peptide
ggcccgcccctctctgcccc

SEQ ID NO: 2879 - DNA, 20 bp, Artificial
  Synthetically generated peptide
gcccgcccctctctgcccca

SEQ ID NO: 2880 - DNA, 20 bp, Artificial
  Synthetically generated peptide
cccgcccctctctgccccac

SEQ ID NO: 2881 - DNA, 20 bp, Artificial
  Synthetically generated peptide
ccgcccctctctgccccacc

SEQ ID NO: 2882 - DNA, 20 bp, Artificial
  Synthetically generated peptide
cgcccctctctgccccaccc

SEQ ID NO: 2883 - DNA, 20 bp, Artificial
  Synthetically generated peptide
ggcgcactcgggcccgcccc

SEQ ID NO: 2884 - DNA, 20 bp, Artificial
  Synthetically generated peptide
gggcgcactcgggcccgccc

SEQ ID NO: 2885 - DNA, 20 bp, Artificial
  Synthetically generated peptide
ggggcgcactcgggcccgcc

SEQ ID NO: 2886 - DNA, 20 bp, Artificial
  Synthetically generated peptide
gggggcgcactcgggcccgc

SEQ ID NO: 2887 - DNA, 20 bp, Artificial
  Synthetically generated peptide
ggggggcgcactcgggcccg

SEQ ID NO: 2888 - DNA, 20 bp, Artificial
  Synthetically generated peptide
cggggggcgcactcgggccc

SEQ ID NO: 2889 - DNA, 20 bp, Artificial
  Synthetically generated peptide
gcggggggcgcactcgggcc

SEQ ID NO: 2890 - DNA, 20 bp, Artificial
  Synthetically generated peptide
ggcggggggcgcactcgggc

SEQ ID NO: 2891 - DNA, 24 bp, Artificial
  Synthetically generated peptide
cgctccgagggtccgctggctcgg

SEQ ID NO: 2892 - DNA, 20 bp, Artificial
  Synthetically generated peptide
gctccgagggtccgctggct

SEQ ID NO: 2893 - DNA, 20 bp, Artificial
  Synthetically generated peptide
ctccgagggtccgctggctc

SEQ ID NO: 2894 - DNA, 20 bp, Artificial
  Synthetically generated peptide
tccgagggtccgctggctcg

SEQ ID NO: 2895 - DNA, 20 bp, Artificial
  Synthetically generated peptide
ccgagggtccgctggctcgg

SEQ ID NO: 2896 - DNA, 20 bp, Artificial
  Synthetically generated peptide
cgagggtccgctggctcggt

SEQ ID NO: 2897 - DNA, 20 bp, Artificial
  Synthetically generated peptide
gagggtccgctggctcggtg

SEQ ID NO: 2898 - DNA, 20 bp, Artificial
  Synthetically generated peptide
agggtccgctggctcggtgg

SEQ ID NO: 2899 - DNA, 20 bp, Artificial
  Synthetically generated peptide
gggtccgctggctcggtggc

SEQ ID NO: 2900 - DNA, 20 bp, Artificial
  Synthetically generated peptide
ggtccgctggctcggtggcc

SEQ ID NO: 2901 - DNA, 20 bp, Artificial
  Synthetically generated peptide
gtccgctggctcggtggcct

SEQ ID NO: 2902 - DNA, 20 bp, Artificial
  Synthetically generated peptide
tccgctggctcggtggcctg

SEQ ID NO: 2903 - DNA, 20 bp, Artificial
  Synthetically generated peptide
ccgctggctcggtggcctgg

SEQ ID NO: 2904 - DNA, 20 bp, Artificial
  Synthetically generated peptide
cgctggctcggtggcctggg

SEQ ID NO: 2905 - DNA, 20 bp, Artificial
  Synthetically generated peptide
gctggctcggtggcctgggg

SEQ ID NO: 2906 - DNA, 20 bp, Artificial
  Synthetically generated peptide
ctggctcggtggcctggggt

SEQ ID NO: 2907 - DNA, 20 bp, Artificial
  Synthetically generated peptide
tggctcggtggcctggggtt

SEQ ID NO: 2908 - DNA, 20 bp, Artificial
  Synthetically generated peptide
ggctcggtggcctggggttt

SEQ ID NO: 2909 - DNA, 20 bp, Artificial
  Synthetically generated peptide
gctcggtggcctggggtttg

SEQ ID NO: 2910 - DNA, 20 bp, Artificial
  Synthetically generated peptide
ctcggtggcctggggtttgc

SEQ ID NO: 2911 - DNA, 20 bp, Artificial
  Synthetically generated peptide
tcggtggcctggggtttgcc

SEQ ID NO: 2912 - DNA, 20 bp, Artificial
  Synthetically generated peptide
cggtggcctggggtttgccc

SEQ ID NO: 2913 - DNA, 20 bp, Artificial
  Synthetically generated peptide
ggtggcctggggtttgcccg

SEQ ID NO: 2914 - DNA, 20 bp, Artificial
  Synthetically generated peptide
gtggcctggggtttgcccgg

SEQ ID NO: 2915 - DNA, 20 bp, Artificial
  Synthetically generated peptide
tggcctggggtttgcccggc

SEQ ID NO: 2916 - DNA, 20 bp, Artificial
  Synthetically generated peptide
ggcctggggtttgcccggct

SEQ ID NO: 2917 - DNA, 20 bp, Artificial
  Synthetically generated peptide
gcctggggtttgcccggctc

SEQ ID NO: 2918 - DNA, 20 bp, Artificial
  Synthetically generated peptide
cctggggtttgcccggctca

SEQ ID NO: 2919 - DNA, 20 bp, Artificial
  Synthetically generated peptide
ctggggtttgcccggctcag

SEQ ID NO: 2920 - DNA, 20 bp, Artificial
  Synthetically generated peptide
tggggtttgcccggctcagc

SEQ ID NO: 2921 - DNA, 20 bp, Artificial
  Synthetically generated peptide
ggggtttgcccggctcagcg

SEQ ID NO: 2922 - DNA, 20 bp, Artificial
  Synthetically generated peptide
gggtttgcccggctcagcgg

SEQ ID NO: 2923 - DNA, 20 bp, Artificial
  Synthetically generated peptide
ggtttgcccggctcagcggc

SEQ ID NO: 2924 - DNA, 20 bp, Artificial
  Synthetically generated peptide
gtttgcccggctcagcggct

SEQ ID NO: 2925 - DNA, 20 bp, Artificial
  Synthetically generated peptide
tttgcccggctcagcggctc

SEQ ID NO: 2926 - DNA, 20 bp, Artificial
  Synthetically generated peptide
ttgcccggctcagcggctca

SEQ ID NO: 2927 - DNA, 20 bp, Artificial
  Synthetically generated peptide
tgcccggctcagcggctcat

SEQ ID NO: 2928 - DNA, 20 bp, Artificial
  Synthetically generated peptide
gcccggctcagcggctcatg

SEQ ID NO: 2929 - DNA, 20 bp, Artificial
  Synthetically generated peptide
cccggctcagcggctcatgg

SEQ ID NO: 2930 - DNA, 20 bp, Artificial
  Synthetically generated peptide
ccggctcagcggctcatggt

SEQ ID NO: 2931 - DNA, 20 bp, Artificial
  Synthetically generated peptide
cggctcagcggctcatggtc

SEQ ID NO: 2932 - DNA, 20 bp, Artificial
  Synthetically generated peptide
ggctcagcggctcatggtcc

SEQ ID NO: 2933 - DNA, 20 bp, Artificial
  Synthetically generated peptide
gctcagcggctcatggtccg

SEQ ID NO: 2934 - DNA, 20 bp, Artificial
  Synthetically generated peptide
ctcagcggctcatggtccgg

SEQ ID NO: 2935 - DNA, 20 bp, Artificial
  Synthetically generated peptide
tcagcggctcatggtccggc

SEQ ID NO: 2936 - DNA, 20 bp, Artificial
  Synthetically generated peptide
cagcggctcatggtccggcc

SEQ ID NO: 2937 - DNA, 20 bp, Artificial
  Synthetically generated peptide
agcggctcatggtccggccc

SEQ ID NO: 2938 - DNA, 20 bp, Artificial
  Synthetically generated peptide
gcggctcatggtccggcccc

SEQ ID NO: 2939 - DNA, 20 bp, Artificial
  Synthetically generated peptide
cggctcatggtccggccccc

SEQ ID NO: 2940 - DNA, 20 bp, Artificial
  Synthetically generated peptide
ggctcatggtccggcccccg

SEQ ID NO: 2941 - DNA, 20 bp, Artificial
  Synthetically generated peptide
gctcatggtccggcccccgc

SEQ ID NO: 2942 - DNA, 20 bp, Artificial
  Synthetically generated peptide
ctcatggtccggcccccgcg

SEQ ID NO: 2943 - DNA, 20 bp, Artificial
  Synthetically generated peptide
tcatggtccggcccccgcgc

SEQ ID NO: 2944 - DNA, 20 bp, Artificial
  Synthetically generated peptide
catggtccggcccccgcgcc

SEQ ID NO: 2945 - DNA, 20 bp, Artificial
  Synthetically generated peptide
atggtccggcccccgcgccc

SEQ ID NO: 2946 - DNA, 20 bp, Artificial
  Synthetically generated peptide
tggtccggcccccgcgcccc

SEQ ID NO: 2947 - DNA, 20 bp, Artificial
  Synthetically generated peptide
ggtccggcccccgcgcccca

SEQ ID NO: 2948 - DNA, 20 bp, Artificial
  Synthetically generated peptide
gtccggcccccgcgccccag

SEQ ID NO: 2949 - DNA, 20 bp, Artificial
  Synthetically generated peptide
tccggcccccgcgccccagc

SEQ ID NO: 2950 - DNA, 20 bp, Artificial
  Synthetically generated peptide
ccggcccccgcgccccagcc

SEQ ID NO: 2951 - DNA, 20 bp, Artificial
  Synthetically generated peptide
cggcccccgcgccccagccc

SEQ ID NO: 2952 - DNA, 20 bp, Artificial
  Synthetically generated peptide
ggcccccgcgccccagcccc

SEQ ID NO: 2953 - DNA, 20 bp, Artificial
  Synthetically generated peptide
gcccccgcgccccagccccc

SEQ ID NO: 2954 - DNA, 20 bp, Artificial
  Synthetically generated peptide
cccccgcgccccagcccccg

SEQ ID NO: 2955 - DNA, 20 bp, Artificial
  Synthetically generated peptide
ccccgcgccccagcccccgc

SEQ ID NO: 2956 - DNA, 20 bp, Artificial
  Synthetically generated peptide
cccgcgccccagcccccgcc

SEQ ID NO: 2957 - DNA, 20 bp, Artificial
  Synthetically generated peptide
ccgcgccccagcccccgccg

SEQ ID NO: 2958 - DNA, 20 bp, Artificial
  Synthetically generated peptide
cgcgccccagcccccgccgc

SEQ ID NO: 2959 - DNA, 20 bp, Artificial
  Synthetically generated peptide
gcgccccagcccccgccgcc

SEQ ID NO: 2960 - DNA, 20 bp, Artificial
  Synthetically generated peptide
cgccccagcccccgccgccg

SEQ ID NO: 2961 - DNA, 20 bp, Artificial
  Synthetically generated peptide
gccccagcccccgccgccgc

SEQ ID NO: 2962 - DNA, 20 bp, Artificial
  Synthetically generated peptide
ccccagcccccgccgccgcc

SEQ ID NO: 2963 - DNA, 20 bp, Artificial
  Synthetically generated peptide
cccagcccccgccgccgccg

SEQ ID NO: 2964 - DNA, 20 bp, Artificial
  Synthetically generated peptide
ccagcccccgccgccgccgc

SEQ ID NO: 2965 - DNA, 20 bp, Artificial
  Synthetically generated peptide
cagcccccgccgccgccgcc

SEQ ID NO: 2966 - DNA, 20 bp, Artificial
  Synthetically generated peptide
agcccccgccgccgccgccg

SEQ ID NO: 2967 - DNA, 20 bp, Artificial
  Synthetically generated peptide
gcccccgccgccgccgccgc

SEQ ID NO: 2968 - DNA, 20 bp, Artificial
  Synthetically generated peptide
cccccgccgccgccgccgcc

SEQ ID NO: 2969 - DNA, 20 bp, Artificial
  Synthetically generated peptide
ccccgccgccgccgccgccg

SEQ ID NO: 2970 - DNA, 20 bp, Artificial
  Synthetically generated peptide
cccgccgccgccgccgccgc

SEQ ID NO: 2971 - DNA, 20 bp, Artificial
  Synthetically generated peptide
ccgccgccgccgccgccgcc

SEQ ID NO: 2972 - DNA, 20 bp, Artificial
  Synthetically generated peptide
cgccgccgccgccgccgccg

SEQ ID NO: 2973 - DNA, 20 bp, Artificial
  Synthetically generated peptide
gccgccgccgccgccgccgc

SEQ ID NO: 2974 - DNA, 20 bp, Artificial
  Synthetically generated peptide
ccgccgccgccgccgccgca

SEQ ID NO: 2975 - DNA, 20 bp, Artificial
  Synthetically generated peptide
cgccgccgccgccgccgcag

SEQ ID NO: 2976 - DNA, 20 bp, Artificial
  Synthetically generated peptide
gccgccgccgccgccgcagg

SEQ ID NO: 2977 - DNA, 20 bp, Artificial
  Synthetically generated peptide
ccgccgccgccgccgcaggt

SEQ ID NO: 2978 - DNA, 20 bp, Artificial
  Synthetically generated peptide
cgccgccgccgccgcaggtc

SEQ ID NO: 2979 - DNA, 20 bp, Artificial
  Synthetically generated peptide
gccgccgccgccgcaggtcc

SEQ ID NO: 2980 - DNA, 20 bp, Artificial
  Synthetically generated peptide
ccgccgccgccgcaggtcct

SEQ ID NO: 2981 - DNA, 20 bp, Artificial
  Synthetically generated peptide
cgccgccgccgcaggtcctg

SEQ ID NO: 2982 - DNA, 20 bp, Artificial
  Synthetically generated peptide
gccgccgccgcaggtcctgg

SEQ ID NO: 2983 - DNA, 20 bp, Artificial
  Synthetically generated peptide
ccgccgccgcaggtcctggc

SEQ ID NO: 2984 - DNA, 20 bp, Artificial
  Synthetically generated peptide
cgccgccgcaggtcctggca

SEQ ID NO: 2985 - DNA, 20 bp, Artificial
  Synthetically generated peptide
gccgccgcaggtcctggcaa

SEQ ID NO: 2986 - DNA, 20 bp, Artificial
  Synthetically generated peptide
ccgccgcaggtcctggcaat

SEQ ID NO: 2987 - DNA, 20 bp, Artificial
  Synthetically generated peptide
cgccgcaggtcctggcaatc

SEQ ID NO: 2988 - DNA, 20 bp, Artificial
  Synthetically generated peptide
gccgcaggtcctggcaatcc

SEQ ID NO: 2989 - DNA, 20 bp, Artificial
  Synthetically generated peptide
ccgcaggtcctggcaatccc

SEQ ID NO: 2990 - DNA, 20 bp, Artificial
  Synthetically generated peptide
cgcaggtcctggcaatccct

SEQ ID NO: 2991 - DNA, 20 bp, Artificial
  Synthetically generated peptide
gcgctccgagggtccgctgg

SEQ ID NO: 2992 - DNA, 20 bp, Artificial
  Synthetically generated peptide
tgcgctccgagggtccgctg

SEQ ID NO: 2993 - DNA, 20 bp, Artificial
  Synthetically generated peptide
ctgcgctccgagggtccgct

SEQ ID NO: 2994 - DNA, 20 bp, Artificial
  Synthetically generated peptide
gctgcgctccgagggtccgc

SEQ ID NO: 2995 - DNA, 20 bp, Artificial
  Synthetically generated peptide
ggctgcgctccgagggtccg

SEQ ID NO: 2996 - DNA, 20 bp, Artificial
  Synthetically generated peptide
gggctgcgctccgagggtcc

SEQ ID NO: 2997 - DNA, 20 bp, Artificial
  Synthetically generated peptide
agggctgcgctccgagggtc

SEQ ID NO: 2998 - DNA, 20 bp, Artificial
  Synthetically generated peptide
cagggctgcgctccgagggt

SEQ ID NO: 2999 - DNA, 20 bp, Artificial
  Synthetically generated peptide
gcagggctgcgctccgaggg

SEQ ID NO: 3000 - DNA, 20 bp, Artificial
  Synthetically generated peptide
cgcagggctgcgctccgagg

SEQ ID NO: 3001 - DNA, 20 bp, Artificial
  Synthetically generated peptide
gcgcagggctgcgctccgag

SEQ ID NO: 3002 - DNA, 20 bp, Artificial
  Synthetically generated peptide
ggcgcagggctgcgctccga

SEQ ID NO: 3003 - DNA, 20 bp, Artificial
  Synthetically generated peptide
cggcgcagggctgcgctccg

SEQ ID NO: 3004 - DNA, 20 bp, Artificial
  Synthetically generated peptide
gcggcgcagggctgcgctcc

SEQ ID NO: 3005 - DNA, 20 bp, Artificial
  Synthetically generated peptide
cgcggcgcagggctgcgctc

SEQ ID NO: 3006 - DNA, 20 bp, Artificial
  Synthetically generated peptide
ccgcggcgcagggctgcgct

SEQ ID NO: 3007 - DNA, 20 bp, Artificial
  Synthetically generated peptide
tccgcggcgcagggctgcgc

SEQ ID NO: 3008 - DNA, 20 bp, Artificial
  Synthetically generated peptide
ctccgcggcgcagggctgcg

SEQ ID NO: 3009 - DNA, 20 bp, Artificial
  Synthetically generated peptide
gctccgcggcgcagggctgc

SEQ ID NO: 3010 - DNA, 20 bp, Artificial
  Synthetically generated peptide
tgctccgcggcgcagggctg

SEQ ID NO: 3011 - DNA, 20 bp, Artificial
  Synthetically generated peptide
ctgctccgcggcgcagggct

SEQ ID NO: 3012 - DNA, 20 bp, Artificial
  Synthetically generated peptide
cctgctccgcggcgcagggc

SEQ ID NO: 3013 - DNA, 20 bp, Artificial
  Synthetically generated peptide
gcctgctccgcggcgcaggg

SEQ ID NO: 3014 - DNA, 20 bp, Artificial
  Synthetically generated peptide
agcctgctccgcggcgcagg

SEQ ID NO: 3015 - DNA, 20 bp, Artificial
  Synthetically generated peptide
gagcctgctccgcggcgcag

SEQ ID NO: 3016 - DNA, 20 bp, Artificial
  Synthetically generated peptide
ggagcctgctccgcggcgca

SEQ ID NO: 3017 - DNA, 20 bp, Artificial
  Synthetically generated peptide
tggagcctgctccgcggcgc

SEQ ID NO: 3018 - DNA, 20 bp, Artificial
  Synthetically generated peptide
ttggagcctgctccgcggcg

SEQ ID NO: 3019 - DNA, 20 bp, Artificial
  Synthetically generated peptide
gttggagcctgctccgcggc

SEQ ID NO: 3020 - DNA, 20 bp, Artificial
  Synthetically generated peptide
ggttggagcctgctccgcgg

SEQ ID NO: 3021 - DNA, 20 bp, Artificial
  Synthetically generated peptide
tggttggagcctgctccgcg

SEQ ID NO: 3022 - DNA, 20 bp, Artificial
  Synthetically generated peptide
ctggttggagcctgctccgc

SEQ ID NO: 3023 - DNA, 20 bp, Artificial
  Synthetically generated peptide
cctggttggagcctgctccg

SEQ ID NO: 3024 - DNA, 25 bp, Artificial
  Synthetically generated peptide
gtccaccctcagtgcacgacctcgt

SEQ ID NO: 3025 - DNA, 20 bp, Artificial
  Synthetically generated peptide
tccaccctcagtgcacgacc

SEQ ID NO: 3026 - DNA, 20 bp, Artificial
  Synthetically generated peptide
ccaccctcagtgcacgacct

SEQ ID NO: 3027 - DNA, 20 bp, Artificial
  Synthetically generated peptide
caccctcagtgcacgacctc

SEQ ID NO: 3028 - DNA, 20 bp, Artificial
  Synthetically generated peptide
accctcagtgcacgacctcg

SEQ ID NO: 3029 - DNA, 20 bp, Artificial
  Synthetically generated peptide
ccctcagtgcacgacctcgt

SEQ ID NO: 3030 - DNA, 20 bp, Artificial
  Synthetically generated peptide
cctcagtgcacgacctcgtc

SEQ ID NO: 3031 - DNA, 20 bp, Artificial
  Synthetically generated peptide
ctcagtgcacgacctcgtca

SEQ ID NO: 3032 - DNA, 20 bp, Artificial
  Synthetically generated peptide
tcagtgcacgacctcgtcac

SEQ ID NO: 3033 - DNA, 20 bp, Artificial
  Synthetically generated peptide
cagtgcacgacctcgtcacc

SEQ ID NO: 3034 - DNA, 20 bp, Artificial
  Synthetically generated peptide
agtgcacgacctcgtcaccc

SEQ ID NO: 3035 - DNA, 20 bp, Artificial
  Synthetically generated peptide
gtgcacgacctcgtcacccc

SEQ ID NO: 3036 - DNA, 20 bp, Artificial
  Synthetically generated peptide
tgcacgacctcgtcacccca

SEQ ID NO: 3037 - DNA, 20 bp, Artificial
  Synthetically generated peptide
gcacgacctcgtcaccccac

SEQ ID NO: 3038 - DNA, 20 bp, Artificial
  Synthetically generated peptide
cacgacctcgtcaccccact

SEQ ID NO: 3039 - DNA, 20 bp, Artificial
  Synthetically generated peptide
acgacctcgtcaccccactt

SEQ ID NO: 3040 - DNA, 20 bp, Artificial
  Synthetically generated peptide
cgacctcgtcaccccacttg

SEQ ID NO: 3041 - DNA, 20 bp, Artificial
  Synthetically generated peptide
gacctcgtcaccccacttgc

SEQ ID NO: 3042 - DNA, 20 bp, Artificial
  Synthetically generated peptide
acctcgtcaccccacttgcc

SEQ ID NO: 3043 - DNA, 20 bp, Artificial
  Synthetically generated peptide
cctcgtcaccccacttgcct

SEQ ID NO: 3044 - DNA, 20 bp, Artificial
  Synthetically generated peptide
ctcgtcaccccacttgcctc

SEQ ID NO: 3045 - DNA, 20 bp, Artificial
  Synthetically generated peptide
tcgtcaccccacttgcctct

SEQ ID NO: 3046 - DNA, 20 bp, Artificial
  Synthetically generated peptide
cgtcaccccacttgcctctc

SEQ ID NO: 3047 - DNA, 20 bp, Artificial
  Synthetically generated peptide
cgtccaccctcagtgcacga

SEQ ID NO: 3048 - DNA, 20 bp, Artificial
  Synthetically generated peptide
acgtccaccctcagtgcacg

SEQ ID NO: 3049 - DNA, 20 bp, Artificial
  Synthetically generated peptide
tacgtccaccctcagtgcac

SEQ ID NO: 3050 - DNA, 20 bp, Artificial
  Synthetically generated peptide
ctacgtccaccctcagtgca

SEQ ID NO: 3051 - DNA, 20 bp, Artificial
  Synthetically generated peptide
tctacgtccaccctcagtgc

SEQ ID NO: 3052 - DNA, 20 bp, Artificial
  Synthetically generated peptide
ctctacgtccaccctcagtg

SEQ ID NO: 3053 - DNA, 20 bp, Artificial
  Synthetically generated peptide
cctctacgtccaccctcagt

SEQ ID NO: 3054 - DNA, 20 bp, Artificial
  Synthetically generated peptide
gcctctacgtccaccctcag

SEQ ID NO: 3055 - DNA, 20 bp, Artificial
  Synthetically generated peptide
ggcctctacgtccaccctca

SEQ ID NO: 3056 - DNA, 20 bp, Artificial
  Synthetically generated peptide
tggcctctacgtccaccctc

SEQ ID NO: 3057 - DNA, 20 bp, Artificial
  Synthetically generated peptide
ctggcctctacgtccaccct

SEQ ID NO: 3058 - DNA, 20 bp, Artificial
  Synthetically generated peptide
cctggcctctacgtccaccc

SEQ ID NO: 3059 - DNA, 20 bp, Artificial
  Synthetically generated peptide
tcctggcctctacgtccacc

SEQ ID NO: 3060 - DNA, 20 bp, Artificial
  Synthetically generated peptide
ctcctggcctctacgtccac

SEQ ID NO: 3061 - DNA, 20 bp, Artificial
  Synthetically generated peptide
actcctggcctctacgtcca

SEQ ID NO: 3062 - DNA, 20 bp, Artificial
  Synthetically generated peptide
tactcctggcctctacgtcc

SEQ ID NO: 3063 - DNA, 20 bp, Artificial
  Synthetically generated peptide
ctactcctggcctctacgtc

SEQ ID NO: 3064 - DNA, 20 bp, Artificial
  Synthetically generated peptide
gctactcctggcctctacgt

SEQ ID NO: 3065 - DNA, 20 bp, Artificial
  Synthetically generated peptide
tgctactcctggcctctacg

SEQ ID NO: 3066 - DNA, 24 bp, Artificial
  Synthetically generated peptide
caccgcctgaggaagtctggatgc

SEQ ID NO: 3067 - DNA, 20 bp, Artificial
  Synthetically generated peptide
accgcctgaggaagtctgga

SEQ ID NO: 3068 - DNA, 20 bp, Artificial
  Synthetically generated peptide
ccgcctgaggaagtctggat

SEQ ID NO: 3069 - DNA, 20 bp, Artificial
  Synthetically generated peptide
cgcctgaggaagtctggatg

SEQ ID NO: 3070 - DNA, 20 bp, Artificial
  Synthetically generated peptide
ccaccgcctgaggaagtctg

SEQ ID NO: 3071 - DNA, 20 bp, Artificial
  Synthetically generated peptide
gccaccgcctgaggaagtct

SEQ ID NO: 3072 - DNA, 20 bp, Artificial
  Synthetically generated peptide
agccaccgcctgaggaagtc

SEQ ID NO: 3073 - DNA, 20 bp, Artificial
  Synthetically generated peptide
cagccaccgcctgaggaagt

SEQ ID NO: 3074 - DNA, 20 bp, Artificial
  Synthetically generated peptide
ccagccaccgcctgaggaag

SEQ ID NO: 3075 - DNA, 20 bp, Artificial
  Synthetically generated peptide
tccagccaccgcctgaggaa

SEQ ID NO: 3076 - DNA, 20 bp, Artificial
  Synthetically generated peptide
ctccagccaccgcctgagga

SEQ ID NO: 3077 - DNA, 20 bp, Artificial
  Synthetically generated peptide
cctccagccaccgcctgagg

SEQ ID NO: 3078 - DNA, 20 bp, Artificial
  Synthetically generated peptide
gcctccagccaccgcctgag

SEQ ID NO: 3079 - DNA, 20 bp, Artificial
  Synthetically generated peptide
agcctccagccaccgcctga

SEQ ID NO: 3080 - DNA, 20 bp, Artificial
  Synthetically generated peptide
cagcctccagccaccgcctg

SEQ ID NO: 3081 - DNA, 20 bp, Artificial
  Synthetically generated peptide
gcagcctccagccaccgcct

SEQ ID NO: 3082 - DNA, 20 bp, Artificial
  Synthetically generated peptide
cgcagcctccagccaccgcc

SEQ ID NO: 3083 - DNA, 20 bp, Artificial
  Synthetically generated peptide
gcgcagcctccagccaccgc

SEQ ID NO: 3084 - DNA, 20 bp, Artificial
  Synthetically generated peptide
tgcgcagcctccagccaccg

SEQ ID NO: 3085 - DNA, 20 bp, Artificial
  Synthetically generated peptide
atgcgcagcctccagccacc

SEQ ID NO: 3086 - DNA, 20 bp, Artificial
  Synthetically generated peptide
gatgcgcagcctccagccac

SEQ ID NO: 3087 - DNA, 20 bp, Artificial
  Synthetically generated peptide
agatgcgcagcctccagcca

SEQ ID NO: 3088 - DNA, 20 bp, Artificial
  Synthetically generated peptide
cagatgcgcagcctccagcc

SEQ ID NO: 3089 - DNA, 20 bp, Artificial
  Synthetically generated peptide
ccagatgcgcagcctccagc

SEQ ID NO: 3090 - DNA, 20 bp, Artificial
  Synthetically generated peptide
cccagatgcgcagcctccag

SEQ ID NO: 3091 - DNA, 20 bp, Artificial
  Synthetically generated peptide
ccccagatgcgcagcctcca

SEQ ID NO: 3092 - DNA, 20 bp, Artificial
  Synthetically generated peptide
gccccagatgcgcagcctcc

SEQ ID NO: 3093 - DNA, 20 bp, Artificial
  Synthetically generated peptide
agccccagatgcgcagcctc

SEQ ID NO: 3094 - DNA, 20 bp, Artificial
  Synthetically generated peptide
aagccccagatgcgcagcct

SEQ ID NO: 3095 - DNA, 20 bp, Artificial
  Synthetically generated peptide
aaagccccagatgcgcagcc

SEQ ID NO: 3096 - DNA, 20 bp, Artificial
  Synthetically generated peptide
taaagccccagatgcgcagc

SEQ ID NO: 3097 - DNA, 20 bp, Artificial
  Synthetically generated peptide
ttaaagccccagatgcgcag

SEQ ID NO: 3098 - DNA, 20 bp, Artificial
  Synthetically generated peptide
tttaaagccccagatgcgca

SEQ ID NO: 3099 - DNA, 20 bp, Artificial
  Synthetically generated peptide
gtttaaagccccagatgcgc

SEQ ID NO: 3100 - DNA, 20 bp, Artificial
  Synthetically generated peptide
tgtttaaagccccagatgcg

SEQ ID NO: 3101 - DNA, 22 bp, Artificial
  Synthetically generated peptide
tgcctctctcgcgatctgggcg

SEQ ID NO: 3102 - DNA, 20 bp, Artificial
  Synthetically generated peptide
gcctctctcgcgatctgggc

SEQ ID NO: 3103 - DNA, 20 bp, Artificial
  Synthetically generated peptide
cctctctcgcgatctgggcg

SEQ ID NO: 3104 - DNA, 20 bp, Artificial
  Synthetically generated peptide
ctctctcgcgatctgggcgc

SEQ ID NO: 3105 - DNA, 20 bp, Artificial
  Synthetically generated peptide
tctctcgcgatctgggcgca

SEQ ID NO: 3106 - DNA, 20 bp, Artificial
  Synthetically generated peptide
ctctcgcgatctgggcgcac

SEQ ID NO: 3107 - DNA, 20 bp, Artificial
  Synthetically generated peptide
tctcgcgatctgggcgcaca

SEQ ID NO: 3108 - DNA, 20 bp, Artificial
  Synthetically generated peptide
ctcgcgatctgggcgcacag

SEQ ID NO: 3109 - DNA, 20 bp, Artificial
  Synthetically generated peptide
tcgcgatctgggcgcacagc

SEQ ID NO: 3110 - DNA, 20 bp, Artificial
  Synthetically generated peptide
cgcgatctgggcgcacagcc

SEQ ID NO: 3111 - DNA, 20 bp, Artificial
  Synthetically generated peptide
gcgatctgggcgcacagcct

SEQ ID NO: 3112 - DNA, 20 bp, Artificial
  Synthetically generated peptide
cgatctgggcgcacagcctc

SEQ ID NO: 3113 - DNA, 20 bp, Artificial
  Synthetically generated peptide
gatctgggcgcacagcctca

SEQ ID NO: 3114 - DNA, 20 bp, Artificial
  Synthetically generated peptide
atctgggcgcacagcctcag

SEQ ID NO: 3115 - DNA, 20 bp, Artificial
  Synthetically generated peptide
tctgggcgcacagcctcaga

SEQ ID NO: 3116 - DNA, 20 bp, Artificial
  Synthetically generated peptide
ctgggcgcacagcctcagaa

SEQ ID NO: 3117 - DNA, 20 bp, Artificial
  Synthetically generated peptide
tgggcgcacagcctcagaac

SEQ ID NO: 3118 - DNA, 20 bp, Artificial
  Synthetically generated peptide
gggcgcacagcctcagaacc

SEQ ID NO: 3119 - DNA, 20 bp, Artificial
  Synthetically generated peptide
ggcgcacagcctcagaaccc

SEQ ID NO: 3120 - DNA, 20 bp, Artificial
  Synthetically generated peptide
gcgcacagcctcagaacccc

SEQ ID NO: 3121 - DNA, 20 bp, Artificial
  Synthetically generated peptide
cgcacagcctcagaaccccc

SEQ ID NO: 3122 - DNA, 20 bp, Artificial
  Synthetically generated peptide
ttgcctctctcgcgatctgg

SEQ ID NO: 3123 - DNA, 20 bp, Artificial
  Synthetically generated peptide
cttgcctctctcgcgatctg

SEQ ID NO: 3124 - DNA, 20 bp, Artificial
  Synthetically generated peptide
acttgcctctctcgcgatct

SEQ ID NO: 3125 - DNA, 20 bp, Artificial
  Synthetically generated peptide
cacttgcctctctcgcgatc

SEQ ID NO: 3126 - DNA, 20 bp, Artificial
  Synthetically generated peptide
ccacttgcctctctcgcgat

SEQ ID NO: 3127 - DNA, 20 bp, Artificial
  Synthetically generated peptide
cccacttgcctctctcgcga

SEQ ID NO: 3128 - DNA, 20 bp, Artificial
  Synthetically generated peptide
ccccacttgcctctctcgcg

SEQ ID NO: 3129 - DNA, 20 bp, Artificial
  Synthetically generated peptide
accccacttgcctctctcgc

SEQ ID NO: 3130 - DNA, 20 bp, Artificial
  Synthetically generated peptide
caccccacttgcctctctcg

SEQ ID NO: 3131 - DNA, 24 bp, Artificial
  Synthetically generated peptide
gagggacgccggcttggctaggac

SEQ ID NO: 3132 - DNA, 20 bp, Artificial
  Synthetically generated peptide
agggacgccggcttggctag

SEQ ID NO: 3133 - DNA, 20 bp, Artificial
  Synthetically generated peptide
gggacgccggcttggctagg

SEQ ID NO: 3134 - DNA, 20 bp, Artificial
  Synthetically generated peptide
ggacgccggcttggctagga

SEQ ID NO: 3135 - DNA, 20 bp, Artificial
  Synthetically generated peptide
gacgccggcttggctaggac

SEQ ID NO: 3136 - DNA, 20 bp, Artificial
  Synthetically generated peptide
acgccggcttggctaggaca

SEQ ID NO: 3137 - DNA, 20 bp, Artificial
  Synthetically generated peptide
cgccggcttggctaggacac

SEQ ID NO: 3138 - DNA, 20 bp, Artificial
  Synthetically generated peptide
gccggcttggctaggacacc

SEQ ID NO: 3139 - DNA, 20 bp, Artificial
  Synthetically generated peptide
ccggcttggctaggacaccc

SEQ ID NO: 3140 - DNA, 20 bp, Artificial
  Synthetically generated peptide
cggcttggctaggacaccct

SEQ ID NO: 3141 - DNA, 20 bp, Artificial
  Synthetically generated peptide
ggagggacgccggcttggct

SEQ ID NO: 3142 - DNA, 20 bp, Artificial
  Synthetically generated peptide
aggagggacgccggcttggc

SEQ ID NO: 3143 - DNA, 20 bp, Artificial
  Synthetically generated peptide
taggagggacgccggcttgg

SEQ ID NO: 3144 - DNA, 20 bp, Artificial
  Synthetically generated peptide
ctaggagggacgccggcttg

SEQ ID NO: 3145 - DNA, 20 bp, Artificial
  Synthetically generated peptide
actaggagggacgccggctt

SEQ ID NO: 3146 - DNA, 20 bp, Artificial
  Synthetically generated peptide
tactaggagggacgccggct

SEQ ID NO: 3147 - DNA, 20 bp, Artificial
  Synthetically generated peptide
ctactaggagggacgccggc

SEQ ID NO: 3148 - DNA, 20 bp, Artificial
  Synthetically generated peptide
actactaggagggacgccgg

SEQ ID NO: 3149 - DNA, 20 bp, Artificial
  Synthetically generated peptide
tactactaggagggacgccg

SEQ ID NO: 3150 - DNA, 20 bp, Artificial
  Synthetically generated peptide
gtactactaggagggacgcc

SEQ ID NO: 3151 - DNA, 20 bp, Artificial
  Synthetically generated peptide
ggtactactaggagggacgc

SEQ ID NO: 3152 - DNA, 20 bp, Artificial
  Synthetically generated peptide
cggtactactaggagggacg

SEQ ID NO: 3153 - DNA, 20 bp, Artificial
  Synthetically generated peptide
gcggtactactaggagggac

SEQ ID NO: 3154 - DNA, 22 bp, Artificial
  Synthetically generated peptide
cagagcgtgggtcactggatct

SEQ ID NO: 3155 - DNA, 20 bp, Artificial
  Synthetically generated peptide
agagcgtgggtcactggatc

SEQ ID NO: 3156 - DNA, 20 bp, Artificial
  Synthetically generated peptide
gagcgtgggtcactggatct

SEQ ID NO: 3157 - DNA, 20 bp, Artificial
  Synthetically generated peptide
agcgtgggtcactggatctg

SEQ ID NO: 3158 - DNA, 20 bp, Artificial
  Synthetically generated peptide
gcgtgggtcactggatctgt

SEQ ID NO: 3159 - DNA, 20 bp, Artificial
  Synthetically generated peptide
cgtgggtcactggatctgtg

SEQ ID NO: 3160 - DNA, 20 bp, Artificial
  Synthetically generated peptide
tcagagcgtgggtcactgga

SEQ ID NO: 3161 - DNA, 20 bp, Artificial
  Synthetically generated peptide
ttcagagcgtgggtcactgg

SEQ ID NO: 3162 - DNA, 20 bp, Artificial
  Synthetically generated peptide
cttcagagcgtgggtcactg

SEQ ID NO: 3163 - DNA, 20 bp, Artificial
  Synthetically generated peptide
tcttcagagcgtgggtcact

SEQ ID NO: 3164 - DNA, 20 bp, Artificial
  Synthetically generated peptide
gtcttcagagcgtgggtcac

SEQ ID NO: 3165 - DNA, 20 bp, Artificial
  Synthetically generated peptide
tgtcttcagagcgtgggtca

SEQ ID NO: 3166 - DNA, 20 bp, Artificial
  Synthetically generated peptide
ctgtcttcagagcgtgggtc

SEQ ID NO: 3167 - DNA, 20 bp, Artificial
  Synthetically generated peptide
tctgtcttcagagcgtgggt

SEQ ID NO: 3168 - DNA, 20 bp, Artificial
  Synthetically generated peptide
ttctgtcttcagagcgtggg

SEQ ID NO: 3169 - DNA, 20 bp, Artificial
  Synthetically generated peptide
attctgtcttcagagcgtgg

SEQ ID NO: 3170 - DNA, 20 bp, Artificial
  Synthetically generated peptide
aattctgtcttcagagcgtg

SEQ ID NO: 3171 - DNA, 23 bp, Artificial
  Synthetically generated peptide
caccaacatctgcttacgttgac

SEQ ID NO: 3172 - DNA, 20 bp, Artificial
  Synthetically generated peptide
accaacatctgcttacgttg

SEQ ID NO: 3173 - DNA, 20 bp, Artificial
  Synthetically generated peptide
ccaacatctgcttacgttga

SEQ ID NO: 3174 - DNA, 20 bp, Artificial
  Synthetically generated peptide
caacatctgcttacgttgac

SEQ ID NO: 3175 - DNA, 20 bp, Artificial
  Synthetically generated peptide
acaccaacatctgcttacgt

SEQ ID NO: 3176 - DNA, 20 bp, Artificial
  Synthetically generated peptide
tacaccaacatctgcttacg

SEQ ID NO: 3177 - DNA, 24 bp, Artificial
  Synthetically generated peptide
tccacggacttttgaataccgtgc

SEQ ID NO: 3178 - DNA, 20 bp, Artificial
  Synthetically generated peptide
ccacggacttttgaataccg

SEQ ID NO: 3179 - DNA, 20 bp, Artificial
  Synthetically generated peptide
cacggacttttgaataccgt

SEQ ID NO: 3180 - DNA, 20 bp, Artificial
  Synthetically generated peptide
acggacttttgaataccgtg

SEQ ID NO: 3181 - DNA, 20 bp, Artificial
  Synthetically generated peptide
cggacttttgaataccgtgc

SEQ ID NO: 3182 - DNA, 20 bp, Artificial
  Synthetically generated peptide
ggacttttgaataccgtgcc

SEQ ID NO: 3183 - DNA, 20 bp, Artificial
  Synthetically generated peptide
gacttttgaataccgtgcca

SEQ ID NO: 3184 - DNA, 25 bp, Artificial
  Synthetically generated peptide
tagctacgaataaagaaatttgtag

SEQ ID NO: 3185 - DNA, 24 bp, Artificial
  Synthetically generated peptide
caccgcgtggcttctgccactttc

SEQ ID NO: 3186 - DNA, 20 bp, Artificial
  Synthetically generated peptide
accgcgtggcttctgccact

SEQ ID NO: 3187 - DNA, 20 bp, Artificial
  Synthetically generated peptide
ccgcgtggcttctgccactt

SEQ ID NO: 3188 - DNA, 20 bp, Artificial
  Synthetically generated peptide
cgcgtggcttctgccacttt

SEQ ID NO: 3189 - DNA, 20 bp, Artificial
  Synthetically generated peptide
gcgtggcttctgccactttc

SEQ ID NO: 3190 - DNA, 20 bp, Artificial
  Synthetically generated peptide
cgtggcttctgccactttct

SEQ ID NO: 3191 - DNA, 20 bp, Artificial
  Synthetically generated peptide
ccaccgcgtggcttctgcca

SEQ ID NO: 3192 - DNA, 20 bp, Artificial
  Synthetically generated peptide
gccaccgcgtggcttctgcc

SEQ ID NO: 3193 - DNA, 20 bp, Artificial
  Synthetically generated peptide
tgccaccgcgtggcttctgc

SEQ ID NO: 3194 - DNA, 20 bp, Artificial
  Synthetically generated peptide
ttgccaccgcgtggcttctg

SEQ ID NO: 3195 - DNA, 20 bp, Artificial
  Synthetically generated peptide
tttgccaccgcgtggcttct

SEQ ID NO: 3196 - DNA, 20 bp, Artificial
  Synthetically generated peptide
ttttgccaccgcgtggcttc

SEQ ID NO: 3197 - DNA, 20 bp, Artificial
  Synthetically generated peptide
tttttgccaccgcgtggctt

SEQ ID NO: 3198 - DNA, 20 bp, Artificial
  Synthetically generated peptide
ctttttgccaccgcgtggct

SEQ ID NO: 3199 - DNA, 20 bp, Artificial
  Synthetically generated peptide
cctttttgccaccgcgtggc

SEQ ID NO: 3200 - DNA, 20 bp, Artificial
  Synthetically generated peptide
tcctttttgccaccgcgtgg

SEQ ID NO: 3201 - DNA, 20 bp, Artificial
  Synthetically generated peptide
ctcctttttgccaccgcgtg

SEQ ID NO: 3202 - DNA, 20 bp, Artificial
  Synthetically generated peptide
actcctttttgccaccgcgt

SEQ ID NO: 3203 - DNA, 20 bp, Artificial
  Synthetically generated peptide
gactcctttttgccaccgcg

SEQ ID NO: 3204 - DNA, 20 bp, Artificial
  Synthetically generated peptide
tgactcctttttgccaccgc

SEQ ID NO: 3205 - DNA, 20 bp, Artificial
  Synthetically generated peptide
gtgactcctttttgccaccg

SEQ ID NO: 3206 - DNA, 23 bp, Artificial
  Synthetically generated peptide
tacggacgcaggcacggctctag

SEQ ID NO: 3207 - DNA, 20 bp, Artificial
  Synthetically generated peptide
acggacgcaggcacggctct

SEQ ID NO: 3208 - DNA, 20 bp, Artificial
  Synthetically generated peptide
cggacgcaggcacggctcta

SEQ ID NO: 3209 - DNA, 20 bp, Artificial
  Synthetically generated peptide
ggacgcaggcacggctctag

SEQ ID NO: 3210 - DNA, 20 bp, Artificial
  Synthetically generated peptide
gacgcaggcacggctctagg

SEQ ID NO: 3211 - DNA, 20 bp, Artificial
  Synthetically generated peptide
acgcaggcacggctctaggc

SEQ ID NO: 3212 - DNA, 20 bp, Artificial
  Synthetically generated peptide
cgcaggcacggctctaggct

SEQ ID NO: 3213 - DNA, 20 bp, Artificial
  Synthetically generated peptide
gcaggcacggctctaggctc

SEQ ID NO: 3214 - DNA, 20 bp, Artificial
  Synthetically generated peptide
caggcacggctctaggctct

SEQ ID NO: 3215 - DNA, 20 bp, Artificial
  Synthetically generated peptide
aggcacggctctaggctctg

SEQ ID NO: 3216 - DNA, 20 bp, Artificial
  Synthetically generated peptide
ggcacggctctaggctctga

SEQ ID NO: 3217 - DNA, 20 bp, Artificial
  Synthetically generated peptide
gcacggctctaggctctgaa

SEQ ID NO: 3218 - DNA, 20 bp, Artificial
  Synthetically generated peptide
cacggctctaggctctgaat

SEQ ID NO: 3219 - DNA, 20 bp, Artificial
  Synthetically generated peptide
acggctctaggctctgaatc

SEQ ID NO: 3220 - DNA, 20 bp, Artificial
  Synthetically generated peptide
cggctctaggctctgaatct

SEQ ID NO: 3221 - DNA, 20 bp, Artificial
  Synthetically generated peptide
ctacggacgcaggcacggct

SEQ ID NO: 3222 - DNA, 20 bp, Artificial
  Synthetically generated peptide
actacggacgcaggcacggc

SEQ ID NO: 3223 - DNA, 20 bp, Artificial
  Synthetically generated peptide
aactacggacgcaggcacgg

SEQ ID NO: 3224 - DNA, 20 bp, Artificial
  Synthetically generated peptide
aaactacggacgcaggcacg

SEQ ID NO: 3225 - DNA, 20 bp, Artificial
  Synthetically generated peptide
gaaactacggacgcaggcac

SEQ ID NO: 3226 - DNA, 23 bp, Artificial
  Synthetically generated peptide
cagctccgcagccgtgcactgtg

SEQ ID NO: 3227 - DNA, 20 bp, Artificial
  Synthetically generated peptide
agctccgcagccgtgcactg

SEQ ID NO: 3228 - DNA, 20 bp, Artificial
  Synthetically generated peptide
gctccgcagccgtgcactgt

SEQ ID NO: 3229 - DNA, 20 bp, Artificial
  Synthetically generated peptide
ctccgcagccgtgcactgtg

SEQ ID NO: 3230 - DNA, 20 bp, Artificial
  Synthetically generated peptide
tccgcagccgtgcactgtga

SEQ ID NO: 3231 - DNA, 20 bp, Artificial
  Synthetically generated peptide
ccgcagccgtgcactgtgat

SEQ ID NO: 3232 - DNA, 20 bp, Artificial
  Synthetically generated peptide
cgcagccgtgcactgtgatc

SEQ ID NO: 3233 - DNA, 20 bp, Artificial
  Synthetically generated peptide
gcagccgtgcactgtgatcc

SEQ ID NO: 3234 - DNA, 20 bp, Artificial
  Synthetically generated peptide
cagccgtgcactgtgatccg

SEQ ID NO: 3235 - DNA, 20 bp, Artificial
  Synthetically generated peptide
agccgtgcactgtgatccgt

SEQ ID NO: 3236 - DNA, 20 bp, Artificial
  Synthetically generated peptide
gccgtgcactgtgatccgtc

SEQ ID NO: 3237 - DNA, 20 bp, Artificial
  Synthetically generated peptide
ccgtgcactgtgatccgtct

SEQ ID NO: 3238 - DNA, 20 bp, Artificial
  Synthetically generated peptide
cgtgcactgtgatccgtcta

SEQ ID NO: 3239 - DNA, 20 bp, Artificial
  Synthetically generated peptide
gtgcactgtgatccgtctat

SEQ ID NO: 3240 - DNA, 20 bp, Artificial
  Synthetically generated peptide
tgcactgtgatccgtctatg

SEQ ID NO: 3241 - DNA, 20 bp, Artificial
  Synthetically generated peptide
gcactgtgatccgtctatgt

SEQ ID NO: 3242 - DNA, 20 bp, Artificial
  Synthetically generated peptide
cactgtgatccgtctatgta

SEQ ID NO: 3243 - DNA, 20 bp, Artificial
  Synthetically generated peptide
ccagctccgcagccgtgcac

SEQ ID NO: 3244 - DNA, 20 bp, Artificial
  Synthetically generated peptide
cccagctccgcagccgtgca

SEQ ID NO: 3245 - DNA, 20 bp, Artificial
  Synthetically generated peptide
tcccagctccgcagccgtgc

SEQ ID NO: 3246 - DNA, 20 bp, Artificial
  Synthetically generated peptide
ctcccagctccgcagccgtg

SEQ ID NO: 3247 - DNA, 20 bp, Artificial
  Synthetically generated peptide
gctcccagctccgcagccgt

SEQ ID NO: 3248 - DNA, 20 bp, Artificial
  Synthetically generated peptide
tgctcccagctccgcagccg

SEQ ID NO: 3249 - DNA, 20 bp, Artificial
  Synthetically generated peptide
ctgctcccagctccgcagcc

SEQ ID NO: 3250 - DNA, 20 bp, Artificial
  Synthetically generated peptide
actgctcccagctccgcagc

SEQ ID NO: 3251 - DNA, 20 bp, Artificial
  Synthetically generated peptide
cactgctcccagctccgcag

SEQ ID NO: 3252 - DNA, 20 bp, Artificial
  Synthetically generated peptide
ccactgctcccagctccgca

SEQ ID NO: 3253 - DNA, 20 bp, Artificial
  Synthetically generated peptide
gccactgctcccagctccgc

SEQ ID NO: 3254 - DNA, 20 bp, Artificial
  Synthetically generated peptide
agccactgctcccagctccg

SEQ ID NO: 3255 - DNA, 25 bp, Artificial
  Synthetically generated peptide
cttcaccgattgtctaaacagagac

SEQ ID NO: 3256 - DNA, 24 bp, Artificial
  Synthetically generated peptide
ttcgttcccggtgggctcgagggc

SEQ ID NO: 3257 - DNA, 20 bp, Artificial
  Synthetically generated peptide
tcgttcccggtgggctcgag

SEQ ID NO: 3258 - DNA, 20 bp, Artificial
  Synthetically generated peptide
cgttcccggtgggctcgagg

SEQ ID NO: 3259 - DNA, 20 bp, Artificial
  Synthetically generated peptide
gttcccggtgggctcgaggg

SEQ ID NO: 3260 - DNA, 20 bp, Artificial
  Synthetically generated peptide
ttcccggtgggctcgagggc

SEQ ID NO: 3261 - DNA, 20 bp, Artificial
  Synthetically generated peptide
tcccggtgggctcgagggca

SEQ ID NO: 3262 - DNA, 20 bp, Artificial
  Synthetically generated peptide
cccggtgggctcgagggcag

SEQ ID NO: 3263 - DNA, 20 bp, Artificial
  Synthetically generated peptide
ccggtgggctcgagggcaga

SEQ ID NO: 3264 - DNA, 20 bp, Artificial
  Synthetically generated peptide
tttcgttcccggtgggctcg

SEQ ID NO: 3265 - DNA, 20 bp, Artificial
  Synthetically generated peptide
ctttcgttcccggtgggctc

SEQ ID NO: 3266 - DNA, 20 bp, Artificial
  Synthetically generated peptide
tctttcgttcccggtgggct

SEQ ID NO: 3267 - DNA, 20 bp, Artificial
  Synthetically generated peptide
ctctttcgttcccggtgggc

SEQ ID NO: 3268 - DNA, 20 bp, Artificial
  Synthetically generated peptide
tctctttcgttcccggtggg

SEQ ID NO: 3269 - DNA, 20 bp, Artificial
  Synthetically generated peptide
ttctctttcgttcccggtgg

SEQ ID NO: 3270 - DNA, 20 bp, Artificial
  Synthetically generated peptide
cttctctttcgttcccggtg

SEQ ID NO: 3271 - DNA, 20 bp, Artificial
  Synthetically generated peptide
gcttctctttcgttcccggt

SEQ ID NO: 3272 - DNA, 20 bp, Artificial
  Synthetically generated peptide
agcttctctttcgttcccgg

SEQ ID NO: 3273 - DNA, 20 bp, Artificial
  Synthetically generated peptide
gagcttctctttcgttcccg

SEQ ID NO: 3274 - DNA, 20 bp, Artificial
  Synthetically generated peptide
agagcttctctttcgttccc

SEQ ID NO: 3275 - DNA, 20 bp, Artificial
  Synthetically generated peptide
tagagcttctctttcgttcc

SEQ ID NO: 3276 - DNA, 22 bp, Artificial
  Synthetically generated peptide
tgcttccgcgtcggcacccaag

SEQ ID NO: 3277 - DNA, 20 bp, Artificial
  Synthetically generated peptide
gcttccgcgtcggcacccaa

SEQ ID NO: 3278 - DNA, 20 bp, Artificial
  Synthetically generated peptide
cttccgcgtcggcacccaag

SEQ ID NO: 3279 - DNA, 20 bp, Artificial
  Synthetically generated peptide
ttccgcgtcggcacccaaga

SEQ ID NO: 3280 - DNA, 20 bp, Artificial
  Synthetically generated peptide
tccgcgtcggcacccaagaa

SEQ ID NO: 3281 - DNA, 20 bp, Artificial
  Synthetically generated peptide
ccgcgtcggcacccaagaat

SEQ ID NO: 3282 - DNA, 20 bp, Artificial
  Synthetically generated peptide
cgcgtcggcacccaagaatt

SEQ ID NO: 3283 - DNA, 20 bp, Artificial
  Synthetically generated peptide
gcgtcggcacccaagaattt

SEQ ID NO: 3284 - DNA, 20 bp, Artificial
  Synthetically generated peptide
cgtcggcacccaagaatttc

SEQ ID NO: 3285 - DNA, 20 bp, Artificial
  Synthetically generated peptide
gtcggcacccaagaatttct

SEQ ID NO: 3286 - DNA, 20 bp, Artificial
  Synthetically generated peptide
tcggcacccaagaatttctt

SEQ ID NO: 3287 - DNA, 20 bp, Artificial
  Synthetically generated peptide
cggcacccaagaatttctta

SEQ ID NO: 3288 - DNA, 20 bp, Artificial
  Synthetically generated peptide
ctgcttccgcgtcggcaccc

SEQ ID NO: 3289 - DNA, 20 bp, Artificial
  Synthetically generated peptide
tctgcttccgcgtcggcacc

SEQ ID NO: 3290 - DNA, 20 bp, Artificial
  Synthetically generated peptide
atctgcttccgcgtcggcac

SEQ ID NO: 3291 - DNA, 20 bp, Artificial
  Synthetically generated peptide
aatctgcttccgcgtcggca

SEQ ID NO: 3292 - DNA, 20 bp, Artificial
  Synthetically generated peptide
gaatctgcttccgcgtcggc

SEQ ID NO: 3293 - DNA, 20 bp, Artificial
  Synthetically generated peptide
tgaatctgcttccgcgtcgg

SEQ ID NO: 3294 - DNA, 20 bp, Artificial
  Synthetically generated peptide
ctgaatctgcttccgcgtcg

SEQ ID NO: 3295 - DNA, 20 bp, Artificial
  Synthetically generated peptide
tctgaatctgcttccgcgtc

SEQ ID NO: 3296 - DNA, 20 bp, Artificial
  Synthetically generated peptide
ctctgaatctgcttccgcgt

SEQ ID NO: 3297 - DNA, 20 bp, Artificial
  Synthetically generated peptide
gctctgaatctgcttccgcg

SEQ ID NO: 3298 - DNA, 20 bp, Artificial
  Synthetically generated peptide
ggctctgaatctgcttccgc

SEQ ID NO: 3299 - DNA, 20 bp, Artificial
  Synthetically generated peptide
aggctctgaatctgcttccg

SEQ ID NO: 3300 - DNA, 22 bp, Artificial
  Synthetically generated peptide
tccctgcattgtaaggcccgcc

SEQ ID NO: 3301 - DNA, 20 bp, Artificial
  Synthetically generated peptide
ccctgcattgtaaggcccgc

SEQ ID NO: 3302 - DNA, 20 bp, Artificial
  Synthetically generated peptide
cctgcattgtaaggcccgcc

SEQ ID NO: 3303 - DNA, 20 bp, Artificial
  Synthetically generated peptide
ctgcattgtaaggcccgccc

SEQ ID NO: 3304 - DNA, 20 bp, Artificial
  Synthetically generated peptide
tgcattgtaaggcccgccct

SEQ ID NO: 3305 - DNA, 20 bp, Artificial
  Synthetically generated peptide
gcattgtaaggcccgccctt

SEQ ID NO: 3306 - DNA, 20 bp, Artificial
  Synthetically generated peptide
cattgtaaggcccgcccttt

SEQ ID NO: 3307 - DNA, 20 bp, Artificial
  Synthetically generated peptide
attgtaaggcccgcccttta

SEQ ID NO: 3308 - DNA, 20 bp, Artificial
  Synthetically generated peptide
ttgtaaggcccgccctttat

SEQ ID NO: 3309 - DNA, 20 bp, Artificial
  Synthetically generated peptide
tgtaaggcccgccctttata

SEQ ID NO: 3310 - DNA, 20 bp, Artificial
  Synthetically generated peptide
gtaaggcccgccctttatac

SEQ ID NO: 3311 - DNA, 20 bp, Artificial
  Synthetically generated peptide
taaggcccgccctttatacc

SEQ ID NO: 3312 - DNA, 20 bp, Artificial
  Synthetically generated peptide
aaggcccgccctttatacca

SEQ ID NO: 3313 - DNA, 20 bp, Artificial
  Synthetically generated peptide
aggcccgccctttataccag

SEQ ID NO: 3314 - DNA, 20 bp, Artificial
  Synthetically generated peptide
ggcccgccctttataccagc

SEQ ID NO: 3315 - DNA, 20 bp, Artificial
  Synthetically generated peptide
gcccgccctttataccagca

SEQ ID NO: 3316 - DNA, 20 bp, Artificial
  Synthetically generated peptide
cccgccctttataccagcag

SEQ ID NO: 3317 - DNA, 20 bp, Artificial
  Synthetically generated peptide
ccgccctttataccagcagg

SEQ ID NO: 3318 - DNA, 20 bp, Artificial
  Synthetically generated peptide
cgccctttataccagcaggt

SEQ ID NO: 3319 - DNA, 24 bp, Artificial
  Synthetically generated peptide
cacagcggggatggggtgggaggg

SEQ ID NO: 3320 - DNA, 21 bp, Artificial
  Synthetically generated peptide
gacgtcagaatgaggccatcg

SEQ ID NO: 3321 - DNA, 20 bp, Artificial
  Synthetically generated peptide
acgtcagaatgaggccatcg

SEQ ID NO: 3322 - DNA, 20 bp, Artificial
  Synthetically generated peptide
cgtcagaatgaggccatcgg

SEQ ID NO: 3323 - DNA, 20 bp, Artificial
  Synthetically generated peptide
gtcagaatgaggccatcggt

SEQ ID NO: 3324 - DNA, 20 bp, Artificial
  Synthetically generated peptide
tcagaatgaggccatcggtg

SEQ ID NO: 3325 - DNA, 20 bp, Artificial
  Synthetically generated peptide
cagaatgaggccatcggtga

SEQ ID NO: 3326 - DNA, 20 bp, Artificial
  Synthetically generated peptide
agaatgaggccatcggtgac

SEQ ID NO: 3327 - DNA, 20 bp, Artificial
  Synthetically generated peptide
gaatgaggccatcggtgacc

SEQ ID NO: 3328 - DNA, 20 bp, Artificial
  Synthetically generated peptide
aatgaggccatcggtgacca

SEQ ID NO: 3329 - DNA, 20 bp, Artificial
  Synthetically generated peptide
atgaggccatcggtgaccac

SEQ ID NO: 3330 - DNA, 20 bp, Artificial
  Synthetically generated peptide
tgaggccatcggtgaccaca

SEQ ID NO: 3331 - DNA, 20 bp, Artificial
  Synthetically generated peptide
gaggccatcggtgaccacac

SEQ ID NO: 3332 - DNA, 20 bp, Artificial
  Synthetically generated peptide
aggccatcggtgaccacaca

SEQ ID NO: 3333 - DNA, 20 bp, Artificial
  Synthetically generated peptide
ggccatcggtgaccacacag

SEQ ID NO: 3334 - DNA, 20 bp, Artificial
  Synthetically generated peptide
gccatcggtgaccacacagc

SEQ ID NO: 3335 - DNA, 20 bp, Artificial
  Synthetically generated peptide
ccatcggtgaccacacagct

SEQ ID NO: 3336 - DNA, 20 bp, Artificial
  Synthetically generated peptide
catcggtgaccacacagctg

SEQ ID NO: 3337 - DNA, 20 bp, Artificial
  Synthetically generated peptide
atcggtgaccacacagctgg

SEQ ID NO: 3338 - DNA, 20 bp, Artificial
  Synthetically generated peptide
tcggtgaccacacagctggc

SEQ ID NO: 3339 - DNA, 20 bp, Artificial
  Synthetically generated peptide
cggtgaccacacagctggct

SEQ ID NO: 3340 - DNA, 20 bp, Artificial
  Synthetically generated peptide
agacgtcagaatgaggccat

SEQ ID NO: 3341 - DNA, 23 bp, Artificial
  Synthetically generated peptide
gagccagcacggtggtgggcgcc

SEQ ID NO: 3342 - DNA, 20 bp, Artificial
  Synthetically generated peptide
agccagcacggtggtgggcg

SEQ ID NO: 3343 - DNA, 20 bp, Artificial
  Synthetically generated peptide
gccagcacggtggtgggcgc

SEQ ID NO: 3344 - DNA, 20 bp, Artificial
  Synthetically generated peptide
ccagcacggtggtgggcgcc

SEQ ID NO: 3345 - DNA, 20 bp, Artificial
  Synthetically generated peptide
cagcacggtggtgggcgcct

SEQ ID NO: 3346 - DNA, 20 bp, Artificial
  Synthetically generated peptide
agcacggtggtgggcgccta

SEQ ID NO: 3347 - DNA, 20 bp, Artificial
  Synthetically generated peptide
gcacggtggtgggcgcctat

SEQ ID NO: 3348 - DNA, 20 bp, Artificial
  Synthetically generated peptide
cacggtggtgggcgcctata

SEQ ID NO: 3349 - DNA, 20 bp, Artificial
  Synthetically generated peptide
acggtggtgggcgcctatag

SEQ ID NO: 3350 - DNA, 20 bp, Artificial
  Synthetically generated peptide
cggtggtgggcgcctatagt

SEQ ID NO: 3351 - DNA, 20 bp, Artificial
  Synthetically generated peptide
ggtggtgggcgcctatagtc

SEQ ID NO: 3352 - DNA, 20 bp, Artificial
  Synthetically generated peptide
gtggtgggcgcctatagtcc

SEQ ID NO: 3353 - DNA, 20 bp, Artificial
  Synthetically generated peptide
tggtgggcgcctatagtccc

SEQ ID NO: 3354 - DNA, 20 bp, Artificial
  Synthetically generated peptide
ggtgggcgcctatagtccca

SEQ ID NO: 3355 - DNA, 20 bp, Artificial
  Synthetically generated peptide
gtgggcgcctatagtcccag

SEQ ID NO: 3356 - DNA, 20 bp, Artificial
  Synthetically generated peptide
tgggcgcctatagtcccagc

SEQ ID NO: 3357 - DNA, 20 bp, Artificial
  Synthetically generated peptide
gggcgcctatagtcccagct

SEQ ID NO: 3358 - DNA, 20 bp, Artificial
  Synthetically generated peptide
ggcgcctatagtcccagcta

SEQ ID NO: 3359 - DNA, 20 bp, Artificial
  Synthetically generated peptide
gcgcctatagtcccagctac

SEQ ID NO: 3360 - DNA, 20 bp, Artificial
  Synthetically generated peptide
cgcctatagtcccagctact

SEQ ID NO: 3361 - DNA, 20 bp, Artificial
  Synthetically generated peptide
tgagccagcacggtggtggg

SEQ ID NO: 3362 - DNA, 20 bp, Artificial
  Synthetically generated peptide
atgagccagcacggtggtgg

SEQ ID NO: 3363 - DNA, 20 bp, Artificial
  Synthetically generated peptide
aatgagccagcacggtggtg

SEQ ID NO: 3364 - DNA, 20 bp, Artificial
  Synthetically generated peptide
aaatgagccagcacggtggt

SEQ ID NO: 3365 - DNA, 23 bp, Artificial
  Synthetically generated peptide
gcgtttgtcccaccggcgccccg

SEQ ID NO: 3366 - DNA, 20 bp, Artificial
  Synthetically generated peptide
cgtttgtcccaccggcgccc

SEQ ID NO: 3367 - DNA, 20 bp, Artificial
  Synthetically generated peptide
gtttgtcccaccggcgcccc

SEQ ID NO: 3368 - DNA, 20 bp, Artificial
  Synthetically generated peptide
tttgtcccaccggcgccccg

SEQ ID NO: 3369 - DNA, 20 bp, Artificial
  Synthetically generated peptide
ttgtcccaccggcgccccgt

SEQ ID NO: 3370 - DNA, 20 bp, Artificial
  Synthetically generated peptide
tgtcccaccggcgccccgta

SEQ ID NO: 3371 - DNA, 20 bp, Artificial
  Synthetically generated peptide
gtcccaccggcgccccgtaa

SEQ ID NO: 3372 - DNA, 20 bp, Artificial
  Synthetically generated peptide
tcccaccggcgccccgtaac

SEQ ID NO: 3373 - DNA, 20 bp, Artificial
  Synthetically generated peptide
cccaccggcgccccgtaacc

SEQ ID NO: 3374 - DNA, 20 bp, Artificial
  Synthetically generated peptide
ccaccggcgccccgtaacct

SEQ ID NO: 3375 - DNA, 20 bp, Artificial
  Synthetically generated peptide
caccggcgccccgtaacctc

SEQ ID NO: 3376 - DNA, 20 bp, Artificial
  Synthetically generated peptide
accggcgccccgtaacctct

SEQ ID NO: 3377 - DNA, 20 bp, Artificial
  Synthetically generated peptide
ccggcgccccgtaacctctt

SEQ ID NO: 3378 - DNA, 20 bp, Artificial
  Synthetically generated peptide
cggcgccccgtaacctcttt

SEQ ID NO: 3379 - DNA, 20 bp, Artificial
  Synthetically generated peptide
ggcgccccgtaacctctttt

SEQ ID NO: 3380 - DNA, 20 bp, Artificial
  Synthetically generated peptide
gcgccccgtaacctcttttt

SEQ ID NO: 3381 - DNA, 20 bp, Artificial
  Synthetically generated peptide
cgccccgtaacctctttttc

SEQ ID NO: 3382 - DNA, 20 bp, Artificial
  Synthetically generated peptide
gccccgtaacctctttttcc

SEQ ID NO: 3383 - DNA, 20 bp, Artificial
  Synthetically generated peptide
ccccgtaacctctttttccg

SEQ ID NO: 3384 - DNA, 20 bp, Artificial
  Synthetically generated peptide
cccgtaacctctttttccgg

SEQ ID NO: 3385 - DNA, 20 bp, Artificial
  Synthetically generated peptide
ccgtaacctctttttccggc

SEQ ID NO: 3386 - DNA, 20 bp, Artificial
  Synthetically generated peptide
cgtaacctctttttccggcg

SEQ ID NO: 3387 - DNA, 20 bp, Artificial
  Synthetically generated peptide
gtaacctctttttccggcgc

SEQ ID NO: 3388 - DNA, 20 bp, Artificial
  Synthetically generated peptide
taacctctttttccggcgcg

SEQ ID NO: 3389 - DNA, 20 bp, Artificial
  Synthetically generated peptide
aacctctttttccggcgcgt

SEQ ID NO: 3390 - DNA, 20 bp, Artificial
  Synthetically generated peptide
acctctttttccggcgcgtg

SEQ ID NO: 3391 - DNA, 20 bp, Artificial
  Synthetically generated peptide
cctctttttccggcgcgtgc

SEQ ID NO: 3392 - DNA, 20 bp, Artificial
  Synthetically generated peptide
ctctttttccggcgcgtgcg

SEQ ID NO: 3393 - DNA, 20 bp, Artificial
  Synthetically generated peptide
tctttttccggcgcgtgcgt

SEQ ID NO: 3394 - DNA, 20 bp, Artificial
  Synthetically generated peptide
ctttttccggcgcgtgcgtc

SEQ ID NO: 3395 - DNA, 20 bp, Artificial
  Synthetically generated peptide
tttttccggcgcgtgcgtca

SEQ ID NO: 3396 - DNA, 20 bp, Artificial
  Synthetically generated peptide
ttttccggcgcgtgcgtcac

SEQ ID NO: 3397 - DNA, 20 bp, Artificial
  Synthetically generated peptide
tttccggcgcgtgcgtcaca

SEQ ID NO: 3398 - DNA, 20 bp, Artificial
  Synthetically generated peptide
ttccggcgcgtgcgtcacac

SEQ ID NO: 3399 - DNA, 20 bp, Artificial
  Synthetically generated peptide
tccggcgcgtgcgtcacacg

SEQ ID NO: 3400 - DNA, 20 bp, Artificial
  Synthetically generated peptide
ccggcgcgtgcgtcacacgc

SEQ ID NO: 3401 - DNA, 20 bp, Artificial
  Synthetically generated peptide
cggcgcgtgcgtcacacgct

SEQ ID NO: 3402 - DNA, 20 bp, Artificial
  Synthetically generated peptide
ggcgcgtgcgtcacacgctc

SEQ ID NO: 3403 - DNA, 20 bp, Artificial
  Synthetically generated peptide
gcgcgtgcgtcacacgctct

SEQ ID NO: 3404 - DNA, 20 bp, Artificial
  Synthetically generated peptide
cgcgtgcgtcacacgctctc

SEQ ID NO: 3405 - DNA, 20 bp, Artificial
  Synthetically generated peptide
gcgtgcgtcacacgctctct

SEQ ID NO: 3406 - DNA, 20 bp, Artificial
  Synthetically generated peptide
cgtgcgtcacacgctctctc

SEQ ID NO: 3407 - DNA, 20 bp, Artificial
  Synthetically generated peptide
gtgcgtcacacgctctctcc

SEQ ID NO: 3408 - DNA, 20 bp, Artificial
  Synthetically generated peptide
tgcgtcacacgctctctcct

SEQ ID NO: 3409 - DNA, 20 bp, Artificial
  Synthetically generated peptide
gcgtcacacgctctctcctg

SEQ ID NO: 3410 - DNA, 20 bp, Artificial
  Synthetically generated peptide
cgtcacacgctctctcctgg

SEQ ID NO: 3411 - DNA, 20 bp, Artificial
  Synthetically generated peptide
gtcacacgctctctcctggg

SEQ ID NO: 3412 - DNA, 20 bp, Artificial
  Synthetically generated peptide
tcacacgctctctcctgggg

SEQ ID NO: 3413 - DNA, 20 bp, Artificial
  Synthetically generated peptide
cacacgctctctcctggggt

SEQ ID NO: 3414 - DNA, 20 bp, Artificial
  Synthetically generated peptide
acacgctctctcctggggtc

SEQ ID NO: 3415 - DNA, 20 bp, Artificial
  Synthetically generated peptide
cacgctctctcctggggtcg

SEQ ID NO: 3416 - DNA, 20 bp, Artificial
  Synthetically generated peptide
acgctctctcctggggtcgc

SEQ ID NO: 3417 - DNA, 20 bp, Artificial
  Synthetically generated peptide
cgctctctcctggggtcgcc

SEQ ID NO: 3418 - DNA, 20 bp, Artificial
  Synthetically generated peptide
gctctctcctggggtcgccg

SEQ ID NO: 3419 - DNA, 20 bp, Artificial
  Synthetically generated peptide
ctctctcctggggtcgccgt

SEQ ID NO: 3420 - DNA, 20 bp, Artificial
  Synthetically generated peptide
tctctcctggggtcgccgta

SEQ ID NO: 3421 - DNA, 20 bp, Artificial
  Synthetically generated peptide
ctctcctggggtcgccgtac

SEQ ID NO: 3422 - DNA, 20 bp, Artificial
  Synthetically generated peptide
tctcctggggtcgccgtacc

SEQ ID NO: 3423 - DNA, 20 bp, Artificial
  Synthetically generated peptide
ctcctggggtcgccgtacct

SEQ ID NO: 3424 - DNA, 20 bp, Artificial
  Synthetically generated peptide
tcctggggtcgccgtacctg

SEQ ID NO: 3425 - DNA, 20 bp, Artificial
  Synthetically generated peptide
cctggggtcgccgtacctgg

SEQ ID NO: 3426 - DNA, 20 bp, Artificial
  Synthetically generated peptide
ctggggtcgccgtacctggc

SEQ ID NO: 3427 - DNA, 20 bp, Artificial
  Synthetically generated peptide
tggggtcgccgtacctggct

SEQ ID NO: 3428 - DNA, 20 bp, Artificial
  Synthetically generated peptide
ggggtcgccgtacctggctc

SEQ ID NO: 3429 - DNA, 20 bp, Artificial
  Synthetically generated peptide
gggtcgccgtacctggctcc

SEQ ID NO: 3430 - DNA, 20 bp, Artificial
  Synthetically generated peptide
ggtcgccgtacctggctcct

SEQ ID NO: 3431 - DNA, 20 bp, Artificial
  Synthetically generated peptide
gtcgccgtacctggctcctt

SEQ ID NO: 3432 - DNA, 20 bp, Artificial
  Synthetically generated peptide
tcgccgtacctggctccttc

SEQ ID NO: 3433 - DNA, 20 bp, Artificial
  Synthetically generated peptide
cgccgtacctggctccttct

SEQ ID NO: 3434 - DNA, 20 bp, Artificial
  Synthetically generated peptide
gccgtacctggctccttctg

SEQ ID NO: 3435 - DNA, 20 bp, Artificial
  Synthetically generated peptide
ccgtacctggctccttctga

SEQ ID NO: 3436 - DNA, 20 bp, Artificial
  Synthetically generated peptide
cgtacctggctccttctgat

SEQ ID NO: 3437 - DNA, 20 bp, Artificial
  Synthetically generated peptide
tgcgtttgtcccaccggcgc

SEQ ID NO: 3438 - DNA, 20 bp, Artificial
  Synthetically generated peptide
ctgcgtttgtcccaccggcg

SEQ ID NO: 3439 - DNA, 20 bp, Artificial
  Synthetically generated peptide
gctgcgtttgtcccaccggc

SEQ ID NO: 3440 - DNA, 20 bp, Artificial
  Synthetically generated peptide
ggctgcgtttgtcccaccgg

SEQ ID NO: 3441 - DNA, 20 bp, Artificial
  Synthetically generated peptide
tggctgcgtttgtcccaccg

SEQ ID NO: 3442 - DNA, 20 bp, Artificial
  Synthetically generated peptide
ctggctgcgtttgtcccacc

SEQ ID NO: 3443 - DNA, 20 bp, Artificial
  Synthetically generated peptide
tctggctgcgtttgtcccac

SEQ ID NO: 3444 - DNA, 20 bp, Artificial
  Synthetically generated peptide
gtctggctgcgtttgtccca

SEQ ID NO: 3445 - DNA, 20 bp, Artificial
  Synthetically generated peptide
cgtctggctgcgtttgtccc

SEQ ID NO: 3446 - DNA, 20 bp, Artificial
  Synthetically generated peptide
gcgtctggctgcgtttgtcc

SEQ ID NO: 3447 - DNA, 20 bp, Artificial
  Synthetically generated peptide
ggcgtctggctgcgtttgtc

SEQ ID NO: 3448 - DNA, 20 bp, Artificial
  Synthetically generated peptide
cggcgtctggctgcgtttgt

SEQ ID NO: 3449 - DNA, 20 bp, Artificial
  Synthetically generated peptide
ccggcgtctggctgcgtttg

SEQ ID NO: 3450 - DNA, 20 bp, Artificial
  Synthetically generated peptide
tccggcgtctggctgcgttt

SEQ ID NO: 3451 - DNA, 20 bp, Artificial
  Synthetically generated peptide
gtccggcgtctggctgcgtt

SEQ ID NO: 3452 - DNA, 20 bp, Artificial
  Synthetically generated peptide
agtccggcgtctggctgcgt

SEQ ID NO: 3453 - DNA, 20 bp, Artificial
  Synthetically generated peptide
aagtccggcgtctggctgcg

SEQ ID NO: 3454 - DNA, 20 bp, Artificial
  Synthetically generated peptide
caagtccggcgtctggctgc

SEQ ID NO: 3455 - DNA, 20 bp, Artificial
  Synthetically generated peptide
acaagtccggcgtctggctg

SEQ ID NO: 3456 - DNA, 20 bp, Artificial
  Synthetically generated peptide
aacaagtccggcgtctggct

SEQ ID NO: 3457 - DNA, 20 bp, Artificial
  Synthetically generated peptide
caacaagtccggcgtctggc

SEQ ID NO: 3458 - DNA, 20 bp, Artificial
  Synthetically generated peptide
ccaacaagtccggcgtctgg

SEQ ID NO: 3459 - DNA, 20 bp, Artificial
  Synthetically generated peptide
cccaacaagtccggcgtctg

SEQ ID NO: 3460 - DNA, 20 bp, Artificial
  Synthetically generated peptide
acccaacaagtccggcgtct

SEQ ID NO: 3461 - DNA, 20 bp, Artificial
  Synthetically generated peptide
cacccaacaagtccggcgtc

SEQ ID NO: 3462 - DNA, 20 bp, Artificial
  Synthetically generated peptide
ccacccaacaagtccggcgt

SEQ ID NO: 3463 - DNA, 20 bp, Artificial
  Synthetically generated peptide
gccacccaacaagtccggcg

SEQ ID NO: 3464 - DNA, 20 bp, Artificial
  Synthetically generated peptide
cgccacccaacaagtccggc

SEQ ID NO: 3465 - DNA, 20 bp, Artificial
  Synthetically generated peptide
acgccacccaacaagtccgg

SEQ ID NO: 3466 - DNA, 20 bp, Artificial
  Synthetically generated peptide
aacgccacccaacaagtccg

SEQ ID NO: 3467 - DNA, 20 bp, Artificial
  Synthetically generated peptide
taacgccacccaacaagtcc

SEQ ID NO: 3468 - DNA, 20 bp, Artificial
  Synthetically generated peptide
ctaacgccacccaacaagtc

SEQ ID NO: 3469 - DNA, 20 bp, Artificial
  Synthetically generated peptide
tctaacgccacccaacaagt

SEQ ID NO: 3470 - DNA, 20 bp, Artificial
  Synthetically generated peptide
ttctaacgccacccaacaag

SEQ ID NO: 3471 - DNA, 20 bp, Artificial
  Synthetically generated peptide
tttctaacgccacccaacaa

SEQ ID NO: 3472 - DNA, 20 bp, Artificial
  Synthetically generated peptide
ctttctaacgccacccaaca

SEQ ID NO: 3473 - DNA, 20 bp, Artificial
  Synthetically generated peptide
actttctaacgccacccaac

SEQ ID NO: 3474 - DNA, 20 bp, Artificial
  Synthetically generated peptide
tactttctaacgccacccaa

SEQ ID NO: 3475 - DNA, 20 bp, Artificial
  Synthetically generated peptide
ttactttctaacgccaccca

SEQ ID NO: 3476 - DNA, 20 bp, Artificial
  Synthetically generated peptide
gttactttctaacgccaccc

SEQ ID NO: 3477 - DNA, 20 bp, Artificial
  Synthetically generated peptide
agttactttctaacgccacc

SEQ ID NO: 3478 - DNA, 20 bp, Artificial
  Synthetically generated peptide
gagttactttctaacgccac

SEQ ID NO: 3479 - DNA, 24 bp, Artificial
  Synthetically generated peptide
taacgccacccaacaagtccggcg

SEQ ID NO: 3480 - DNA, 20 bp, Artificial
  Synthetically generated peptide
aacgccacccaacaagtccg

SEQ ID NO: 3481 - DNA, 20 bp, Artificial
  Synthetically generated peptide
acgccacccaacaagtccgg

SEQ ID NO: 3482 - DNA, 20 bp, Artificial
  Synthetically generated peptide
cgccacccaacaagtccggc

SEQ ID NO: 3483 - DNA, 20 bp, Artificial
  Synthetically generated peptide
gccacccaacaagtccggcg

SEQ ID NO: 3484 - DNA, 20 bp, Artificial
  Synthetically generated peptide
ccacccaacaagtccggcgt

SEQ ID NO: 3485 - DNA, 20 bp, Artificial
  Synthetically generated peptide
cacccaacaagtccggcgtc

SEQ ID NO: 3486 - DNA, 20 bp, Artificial
  Synthetically generated peptide
acccaacaagtccggcgtct

SEQ ID NO: 3487 - DNA, 20 bp, Artificial
  Synthetically generated peptide
cccaacaagtccggcgtctg

SEQ ID NO: 3488 - DNA, 20 bp, Artificial
  Synthetically generated peptide
ccaacaagtccggcgtctgg

SEQ ID NO: 3489 - DNA, 20 bp, Artificial
  Synthetically generated peptide
caacaagtccggcgtctggc

SEQ ID NO: 3490 - DNA, 20 bp, Artificial
  Synthetically generated peptide
aacaagtccggcgtctggct

SEQ ID NO: 3491 - DNA, 20 bp, Artificial
  Synthetically generated peptide
acaagtccggcgtctggctg

SEQ ID NO: 3492 - DNA, 20 bp, Artificial
  Synthetically generated peptide
caagtccggcgtctggctgc

SEQ ID NO: 3493 - DNA, 20 bp, Artificial
  Synthetically generated peptide
aagtccggcgtctggctgcg

SEQ ID NO: 3494 - DNA, 20 bp, Artificial
  Synthetically generated peptide
agtccggcgtctggctgcgt

SEQ ID NO: 3495 - DNA, 20 bp, Artificial
  Synthetically generated peptide
gtccggcgtctggctgcgtt

SEQ ID NO: 3496 - DNA, 20 bp, Artificial
  Synthetically generated peptide
tccggcgtctggctgcgttt

SEQ ID NO: 3497 - DNA, 20 bp, Artificial
  Synthetically generated peptide
ccggcgtctggctgcgtttg

SEQ ID NO: 3498 - DNA, 20 bp, Artificial
  Synthetically generated peptide
cggcgtctggctgcgtttgt

SEQ ID NO: 3499 - DNA, 20 bp, Artificial
  Synthetically generated peptide
ggcgtctggctgcgtttgtc

SEQ ID NO: 3500 - DNA, 20 bp, Artificial
  Synthetically generated peptide
gcgtctggctgcgtttgtcc

SEQ ID NO: 3501 - DNA, 20 bp, Artificial
  Synthetically generated peptide
cgtctggctgcgtttgtccc

SEQ ID NO: 3502 - DNA, 20 bp, Artificial
  Synthetically generated peptide
gtctggctgcgtttgtccca

SEQ ID NO: 3503 - DNA, 20 bp, Artificial
  Synthetically generated peptide
tctggctgcgtttgtcccac

SEQ ID NO: 3504 - DNA, 20 bp, Artificial
  Synthetically generated peptide
ctggctgcgtttgtcccacc

SEQ ID NO: 3505 - DNA, 20 bp, Artificial
  Synthetically generated peptide
tggctgcgtttgtcccaccg

SEQ ID NO: 3506 - DNA, 20 bp, Artificial
  Synthetically generated peptide
ggctgcgtttgtcccaccgg

SEQ ID NO: 3507 - DNA, 20 bp, Artificial
  Synthetically generated peptide
gctgcgtttgtcccaccggc

SEQ ID NO: 3508 - DNA, 20 bp, Artificial
  Synthetically generated peptide
ctgcgtttgtcccaccggcg

SEQ ID NO: 3509 - DNA, 20 bp, Artificial
  Synthetically generated peptide
tgcgtttgtcccaccggcgc

SEQ ID NO: 3510 - DNA, 20 bp, Artificial
  Synthetically generated peptide
gcgtttgtcccaccggcgcc

SEQ ID NO: 3511 - DNA, 20 bp, Artificial
  Synthetically generated peptide
cgtttgtcccaccggcgccc

SEQ ID NO: 3512 - DNA, 20 bp, Artificial
  Synthetically generated peptide
gtttgtcccaccggcgcccc

SEQ ID NO: 3513 - DNA, 20 bp, Artificial
  Synthetically generated peptide
tttgtcccaccggcgccccg

SEQ ID NO: 3514 - DNA, 20 bp, Artificial
  Synthetically generated peptide
ttgtcccaccggcgccccgt

SEQ ID NO: 3515 - DNA, 20 bp, Artificial
  Synthetically generated peptide
tgtcccaccggcgccccgta

SEQ ID NO: 3516 - DNA, 20 bp, Artificial
  Synthetically generated peptide
gtcccaccggcgccccgtaa

SEQ ID NO: 3517 - DNA, 20 bp, Artificial
  Synthetically generated peptide
tcccaccggcgccccgtaac

SEQ ID NO: 3518 - DNA, 20 bp, Artificial
  Synthetically generated peptide
cccaccggcgccccgtaacc

SEQ ID NO: 3519 - DNA, 20 bp, Artificial
  Synthetically generated peptide
ccaccggcgccccgtaacct

SEQ ID NO: 3520 - DNA, 20 bp, Artificial
  Synthetically generated peptide
caccggcgccccgtaacctc

SEQ ID NO: 3521 - DNA, 20 bp, Artificial
  Synthetically generated peptide
accggcgccccgtaacctct

SEQ ID NO: 3522 - DNA, 20 bp, Artificial
  Synthetically generated peptide
ccggcgccccgtaacctctt

SEQ ID NO: 3523 - DNA, 20 bp, Artificial
  Synthetically generated peptide
cggcgccccgtaacctcttt

SEQ ID NO: 3524 - DNA, 20 bp, Artificial
  Synthetically generated peptide
ggcgccccgtaacctctttt

SEQ ID NO: 3525 - DNA, 20 bp, Artificial
  Synthetically generated peptide
gcgccccgtaacctcttttt

SEQ ID NO: 3526 - DNA, 20 bp, Artificial
  Synthetically generated peptide
cgccccgtaacctctttttc

SEQ ID NO: 3527 - DNA, 20 bp, Artificial
  Synthetically generated peptide
gccccgtaacctctttttcc

SEQ ID NO: 3528 - DNA, 20 bp, Artificial
  Synthetically generated peptide
ccccgtaacctctttttccg

SEQ ID NO: 3529 - DNA, 20 bp, Artificial
  Synthetically generated peptide
cccgtaacctctttttccgg

SEQ ID NO: 3530 - DNA, 20 bp, Artificial
  Synthetically generated peptide
ccgtaacctctttttccggc

SEQ ID NO: 3531 - DNA, 20 bp, Artificial
  Synthetically generated peptide
cgtaacctctttttccggcg

SEQ ID NO: 3532 - DNA, 20 bp, Artificial
  Synthetically generated peptide
gtaacctctttttccggcgc

SEQ ID NO: 3533 - DNA, 20 bp, Artificial
  Synthetically generated peptide
taacctctttttccggcgcg

SEQ ID NO: 3534 - DNA, 20 bp, Artificial
  Synthetically generated peptide
aacctctttttccggcgcgt

SEQ ID NO: 3535 - DNA, 20 bp, Artificial
  Synthetically generated peptide
acctctttttccggcgcgtg

SEQ ID NO: 3536 - DNA, 20 bp, Artificial
  Synthetically generated peptide
cctctttttccggcgcgtgc

SEQ ID NO: 3537 - DNA, 20 bp, Artificial
  Synthetically generated peptide
ctctttttccggcgcgtgcg

SEQ ID NO: 3538 - DNA, 20 bp, Artificial
  Synthetically generated peptide
tctttttccggcgcgtgcgt

SEQ ID NO: 3539 - DNA, 20 bp, Artificial
  Synthetically generated peptide
ctttttccggcgcgtgcgtc

SEQ ID NO: 3540 - DNA, 20 bp, Artificial
  Synthetically generated peptide
tttttccggcgcgtgcgtca

SEQ ID NO: 3541 - DNA, 20 bp, Artificial
  Synthetically generated peptide
ttttccggcgcgtgcgtcac

SEQ ID NO: 3542 - DNA, 20 bp, Artificial
  Synthetically generated peptide
tttccggcgcgtgcgtcaca

SEQ ID NO: 3543 - DNA, 20 bp, Artificial
  Synthetically generated peptide
ttccggcgcgtgcgtcacac

SEQ ID NO: 3544 - DNA, 20 bp, Artificial
  Synthetically generated peptide
tccggcgcgtgcgtcacacg

SEQ ID NO: 3545 - DNA, 20 bp, Artificial
  Synthetically generated peptide
ccggcgcgtgcgtcacacgc

SEQ ID NO: 3546 - DNA, 20 bp, Artificial
  Synthetically generated peptide
cggcgcgtgcgtcacacgct

SEQ ID NO: 3547 - DNA, 20 bp, Artificial
  Synthetically generated peptide
ggcgcgtgcgtcacacgctc

SEQ ID NO: 3548 - DNA, 20 bp, Artificial
  Synthetically generated peptide
gcgcgtgcgtcacacgctct

SEQ ID NO: 3549 - DNA, 20 bp, Artificial
  Synthetically generated peptide
cgcgtgcgtcacacgctctc

SEQ ID NO: 3550 - DNA, 20 bp, Artificial
  Synthetically generated peptide
gcgtgcgtcacacgctctct

SEQ ID NO: 3551 - DNA, 20 bp, Artificial
  Synthetically generated peptide
cgtgcgtcacacgctctctc

SEQ ID NO: 3552 - DNA, 20 bp, Artificial
  Synthetically generated peptide
gtgcgtcacacgctctctcc

SEQ ID NO: 3553 - DNA, 20 bp, Artificial
  Synthetically generated peptide
tgcgtcacacgctctctcct

SEQ ID NO: 3554 - DNA, 20 bp, Artificial
  Synthetically generated peptide
gcgtcacacgctctctcctg

SEQ ID NO: 3555 - DNA, 20 bp, Artificial
  Synthetically generated peptide
cgtcacacgctctctcctgg

SEQ ID NO: 3556 - DNA, 20 bp, Artificial
  Synthetically generated peptide
gtcacacgctctctcctggg

SEQ ID NO: 3557 - DNA, 20 bp, Artificial
  Synthetically generated peptide
tcacacgctctctcctgggg

SEQ ID NO: 3558 - DNA, 20 bp, Artificial
  Synthetically generated peptide
cacacgctctctcctggggt

SEQ ID NO: 3559 - DNA, 20 bp, Artificial
  Synthetically generated peptide
acacgctctctcctggggtc

SEQ ID NO: 3560 - DNA, 20 bp, Artificial
  Synthetically generated peptide
cacgctctctcctggggtcg

SEQ ID NO: 3561 - DNA, 20 bp, Artificial
  Synthetically generated peptide
acgctctctcctggggtcgc

SEQ ID NO: 3562 - DNA, 20 bp, Artificial
  Synthetically generated peptide
cgctctctcctggggtcgcc

SEQ ID NO: 3563 - DNA, 20 bp, Artificial
  Synthetically generated peptide
gctctctcctggggtcgccg

SEQ ID NO: 3564 - DNA, 20 bp, Artificial
  Synthetically generated peptide
ctctctcctggggtcgccgt

SEQ ID NO: 3565 - DNA, 20 bp, Artificial
  Synthetically generated peptide
tctctcctggggtcgccgta

SEQ ID NO: 3566 - DNA, 20 bp, Artificial
  Synthetically generated peptide
ctctcctggggtcgccgtac

SEQ ID NO: 3567 - DNA, 20 bp, Artificial
  Synthetically generated peptide
tctcctggggtcgccgtacc

SEQ ID NO: 3568 - DNA, 20 bp, Artificial
  Synthetically generated peptide
ctcctggggtcgccgtacct

SEQ ID NO: 3569 - DNA, 20 bp, Artificial
  Synthetically generated peptide
tcctggggtcgccgtacctg

SEQ ID NO: 3570 - DNA, 20 bp, Artificial
  Synthetically generated peptide
cctggggtcgccgtacctgg

SEQ ID NO: 3571 - DNA, 20 bp, Artificial
  Synthetically generated peptide
ctggggtcgccgtacctggc

SEQ ID NO: 3572 - DNA, 20 bp, Artificial
  Synthetically generated peptide
tggggtcgccgtacctggct

SEQ ID NO: 3573 - DNA, 20 bp, Artificial
  Synthetically generated peptide
ggggtcgccgtacctggctc

SEQ ID NO: 3574 - DNA, 20 bp, Artificial
  Synthetically generated peptide
gggtcgccgtacctggctcc

SEQ ID NO: 3575 - DNA, 20 bp, Artificial
  Synthetically generated peptide
ggtcgccgtacctggctcct

SEQ ID NO: 3576 - DNA, 20 bp, Artificial
  Synthetically generated peptide
gtcgccgtacctggctcctt

SEQ ID NO: 3577 - DNA, 20 bp, Artificial
  Synthetically generated peptide
tcgccgtacctggctccttc

SEQ ID NO: 3578 - DNA, 20 bp, Artificial
  Synthetically generated peptide
cgccgtacctggctccttct

SEQ ID NO: 3579 - DNA, 20 bp, Artificial
  Synthetically generated peptide
gccgtacctggctccttctg

SEQ ID NO: 3580 - DNA, 20 bp, Artificial
  Synthetically generated peptide
ccgtacctggctccttctga

SEQ ID NO: 3581 - DNA, 20 bp, Artificial
  Synthetically generated peptide
cgtacctggctccttctgat

SEQ ID NO: 3582 - DNA, 20 bp, Artificial
  Synthetically generated peptide
ctaacgccacccaacaagtc

SEQ ID NO: 3583 - DNA, 20 bp, Artificial
  Synthetically generated peptide
tctaacgccacccaacaagt

SEQ ID NO: 3584 - DNA, 20 bp, Artificial
  Synthetically generated peptide
ttctaacgccacccaacaag

SEQ ID NO: 3585 - DNA, 20 bp, Artificial
  Synthetically generated peptide
tttctaacgccacccaacaa

SEQ ID NO: 3586 - DNA, 20 bp, Artificial
  Synthetically generated peptide
ctttctaacgccacccaaca

SEQ ID NO: 3587 - DNA, 20 bp, Artificial
  Synthetically generated peptide
actttctaacgccacccaac

SEQ ID NO: 3588 - DNA, 20 bp, Artificial
  Synthetically generated peptide
tactttctaacgccacccaa

SEQ ID NO: 3589 - DNA, 20 bp, Artificial
  Synthetically generated peptide
ttactttctaacgccaccca

SEQ ID NO: 3590 - DNA, 20 bp, Artificial
  Synthetically generated peptide
gttactttctaacgccaccc

SEQ ID NO: 3591 - DNA, 20 bp, Artificial
  Synthetically generated peptide
agttactttctaacgccacc

SEQ ID NO: 3592 - DNA, 20 bp, Artificial
  Synthetically generated peptide
gagttactttctaacgccac

SEQ ID NO: 3593 - DNA, 23 bp, Artificial
  Synthetically generated peptide
gaggctcccgcgacgctcacgcg

SEQ ID NO: 3594 - DNA, 20 bp, Artificial
  Synthetically generated peptide
aggctcccgcgacgctcacg

SEQ ID NO: 3595 - DNA, 20 bp, Artificial
  Synthetically generated peptide
ggctcccgcgacgctcacgc

SEQ ID NO: 3596 - DNA, 20 bp, Artificial
  Synthetically generated peptide
gctcccgcgacgctcacgcg

SEQ ID NO: 3597 - DNA, 20 bp, Artificial
  Synthetically generated peptide
ctcccgcgacgctcacgcgc

SEQ ID NO: 3598 - DNA, 20 bp, Artificial
  Synthetically generated peptide
tcccgcgacgctcacgcgct

SEQ ID NO: 3599 - DNA, 20 bp, Artificial
  Synthetically generated peptide
cccgcgacgctcacgcgctc

SEQ ID NO: 3600 - DNA, 20 bp, Artificial
  Synthetically generated peptide
ccgcgacgctcacgcgctcc

SEQ ID NO: 3601 - DNA, 20 bp, Artificial
  Synthetically generated peptide
cgcgacgctcacgcgctcct

SEQ ID NO: 3602 - DNA, 20 bp, Artificial
  Synthetically generated peptide
gcgacgctcacgcgctcctc

SEQ ID NO: 3603 - DNA, 20 bp, Artificial
  Synthetically generated peptide
cgacgctcacgcgctcctct

SEQ ID NO: 3604 - DNA, 20 bp, Artificial
  Synthetically generated peptide
gacgctcacgcgctcctctc

SEQ ID NO: 3605 - DNA, 20 bp, Artificial
  Synthetically generated peptide
acgctcacgcgctcctctca

SEQ ID NO: 3606 - DNA, 20 bp, Artificial
  Synthetically generated peptide
cgctcacgcgctcctctcag

SEQ ID NO: 3607 - DNA, 20 bp, Artificial
  Synthetically generated peptide
gctcacgcgctcctctcagg

SEQ ID NO: 3608 - DNA, 20 bp, Artificial
  Synthetically generated peptide
ctcacgcgctcctctcaggc

SEQ ID NO: 3609 - DNA, 20 bp, Artificial
  Synthetically generated peptide
tcacgcgctcctctcaggct

SEQ ID NO: 3610 - DNA, 20 bp, Artificial
  Synthetically generated peptide
cacgcgctcctctcaggctg

SEQ ID NO: 3611 - DNA, 20 bp, Artificial
  Synthetically generated peptide
acgcgctcctctcaggctgg

SEQ ID NO: 3612 - DNA, 20 bp, Artificial
  Synthetically generated peptide
cgcgctcctctcaggctggc

SEQ ID NO: 3613 - DNA, 20 bp, Artificial
  Synthetically generated peptide
gcgctcctctcaggctggcg

SEQ ID NO: 3614 - DNA, 20 bp, Artificial
  Synthetically generated peptide
cgctcctctcaggctggcgc

SEQ ID NO: 3615 - DNA, 20 bp, Artificial
  Synthetically generated peptide
gctcctctcaggctggcgct

SEQ ID NO: 3616 - DNA, 20 bp, Artificial
  Synthetically generated peptide
ctcctctcaggctggcgctc

SEQ ID NO: 3617 - DNA, 20 bp, Artificial
  Synthetically generated peptide
tcctctcaggctggcgctcc

SEQ ID NO: 3618 - DNA, 20 bp, Artificial
  Synthetically generated peptide
cctctcaggctggcgctccc

SEQ ID NO: 3619 - DNA, 20 bp, Artificial
  Synthetically generated peptide
ctctcaggctggcgctcccc

SEQ ID NO: 3620 - DNA, 20 bp, Artificial
  Synthetically generated peptide
tctcaggctggcgctccccg

SEQ ID NO: 3621 - DNA, 20 bp, Artificial
  Synthetically generated peptide
ctcaggctggcgctccccga

SEQ ID NO: 3622 - DNA, 20 bp, Artificial
  Synthetically generated peptide
tcaggctggcgctccccgag

SEQ ID NO: 3623 - DNA, 20 bp, Artificial
  Synthetically generated peptide
caggctggcgctccccgagc

SEQ ID NO: 3624 - DNA, 20 bp, Artificial
  Synthetically generated peptide
aggctggcgctccccgagcc

SEQ ID NO: 3625 - DNA, 20 bp, Artificial
  Synthetically generated peptide
ggctggcgctccccgagccc

SEQ ID NO: 3626 - DNA, 20 bp, Artificial
  Synthetically generated peptide
gctggcgctccccgagccca

SEQ ID NO: 3627 - DNA, 20 bp, Artificial
  Synthetically generated peptide
ctggcgctccccgagcccag

SEQ ID NO: 3628 - DNA, 20 bp, Artificial
  Synthetically generated peptide
tggcgctccccgagcccagc

SEQ ID NO: 3629 - DNA, 20 bp, Artificial
  Synthetically generated peptide
ggcgctccccgagcccagct

SEQ ID NO: 3630 - DNA, 20 bp, Artificial
  Synthetically generated peptide
gcgctccccgagcccagctg

SEQ ID NO: 3631 - DNA, 20 bp, Artificial
  Synthetically generated peptide
cgctccccgagcccagctgg

SEQ ID NO: 3632 - DNA, 20 bp, Artificial
  Synthetically generated peptide
gctccccgagcccagctggc

SEQ ID NO: 3633 - DNA, 20 bp, Artificial
  Synthetically generated peptide
ctccccgagcccagctggcc

SEQ ID NO: 3634 - DNA, 20 bp, Artificial
  Synthetically generated peptide
tccccgagcccagctggcct

SEQ ID NO: 3635 - DNA, 20 bp, Artificial
  Synthetically generated peptide
ccccgagcccagctggcctg

SEQ ID NO: 3636 - DNA, 20 bp, Artificial
  Synthetically generated peptide
cccgagcccagctggcctgg

SEQ ID NO: 3637 - DNA, 20 bp, Artificial
  Synthetically generated peptide
ccgagcccagctggcctggc

SEQ ID NO: 3638 - DNA, 20 bp, Artificial
  Synthetically generated peptide
cgagcccagctggcctggcc

SEQ ID NO: 3639 - DNA, 20 bp, Artificial
  Synthetically generated peptide
cgaggctcccgcgacgctca

SEQ ID NO: 3640 - DNA, 20 bp, Artificial
  Synthetically generated peptide
ccgaggctcccgcgacgctc

SEQ ID NO: 3641 - DNA, 20 bp, Artificial
  Synthetically generated peptide
cccgaggctcccgcgacgct

SEQ ID NO: 3642 - DNA, 20 bp, Artificial
  Synthetically generated peptide
gcccgaggctcccgcgacgc

SEQ ID NO: 3643 - DNA, 20 bp, Artificial
  Synthetically generated peptide
tgcccgaggctcccgcgacg

SEQ ID NO: 3644 - DNA, 20 bp, Artificial
  Synthetically generated peptide
gtgcccgaggctcccgcgac

SEQ ID NO: 3645 - DNA, 20 bp, Artificial
  Synthetically generated peptide
ggtgcccgaggctcccgcga

SEQ ID NO: 3646 - DNA, 23 bp, Artificial
  Synthetically generated peptide
taccgggcgtctcaggttttgcc

SEQ ID NO: 3647 - DNA, 20 bp, Artificial
  Synthetically generated peptide
accgggcgtctcaggttttg

SEQ ID NO: 3648 - DNA, 20 bp, Artificial
  Synthetically generated peptide
ccgggcgtctcaggttttgc

SEQ ID NO: 3649 - DNA, 20 bp, Artificial
  Synthetically generated peptide
cgggcgtctcaggttttgcc

SEQ ID NO: 3650 - DNA, 20 bp, Artificial
  Synthetically generated peptide
gggcgtctcaggttttgcca

SEQ ID NO: 3651 - DNA, 20 bp, Artificial
  Synthetically generated peptide
ggcgtctcaggttttgccag

SEQ ID NO: 3652 - DNA, 20 bp, Artificial
  Synthetically generated peptide
gcgtctcaggttttgccagg

SEQ ID NO: 3653 - DNA, 20 bp, Artificial
  Synthetically generated peptide
cgtctcaggttttgccaggc

SEQ ID NO: 3654 - DNA, 20 bp, Artificial
  Synthetically generated peptide
gtaccgggcgtctcaggttt

SEQ ID NO: 3655 - DNA, 20 bp, Artificial
  Synthetically generated peptide
tgtaccgggcgtctcaggtt

SEQ ID NO: 3656 - DNA, 20 bp, Artificial
  Synthetically generated peptide
atgtaccgggcgtctcaggt

SEQ ID NO: 3657 - DNA, 20 bp, Artificial
  Synthetically generated peptide
catgtaccgggcgtctcagg

SEQ ID NO: 3658 - DNA, 20 bp, Artificial
  Synthetically generated peptide
acatgtaccgggcgtctcag

SEQ ID NO: 3659 - DNA, 20 bp, Artificial
  Synthetically generated peptide
aacatgtaccgggcgtctca

SEQ ID NO: 3660 - DNA, 20 bp, Artificial
  Synthetically generated peptide
caacatgtaccgggcgtctc

SEQ ID NO: 3661 - DNA, 20 bp, Artificial
  Synthetically generated peptide
ccaacatgtaccgggcgtct

SEQ ID NO: 3662 - DNA, 20 bp, Artificial
  Synthetically generated peptide
gccaacatgtaccgggcgtc

SEQ ID NO: 3663 - DNA, 20 bp, Artificial
  Synthetically generated peptide
ggccaacatgtaccgggcgt

SEQ ID NO: 3664 - DNA, 20 bp, Artificial
  Synthetically generated peptide
tggccaacatgtaccgggcg

SEQ ID NO: 3665 - DNA, 20 bp, Artificial
  Synthetically generated peptide
ttggccaacatgtaccgggc

SEQ ID NO: 3666 - DNA, 20 bp, Artificial
  Synthetically generated peptide
tttggccaacatgtaccggg

SEQ ID NO: 3667 - DNA, 20 bp, Artificial
  Synthetically generated peptide
atttggccaacatgtaccgg

SEQ ID NO: 3668 - DNA, 20 bp, Artificial
  Synthetically generated peptide
catttggccaacatgtaccg

SEQ ID NO: 3669 - DNA, 23 bp, Artificial
  Synthetically generated peptide
tccgagccgcgcacgcctcaggc

SEQ ID NO: 3670 - DNA, 20 bp, Artificial
  Synthetically generated peptide
ccgagccgcgcacgcctcag

SEQ ID NO: 3671 - DNA, 20 bp, Artificial
  Synthetically generated peptide
cgagccgcgcacgcctcagg

SEQ ID NO: 3672 - DNA, 20 bp, Artificial
  Synthetically generated peptide
gagccgcgcacgcctcaggc

SEQ ID NO: 3673 - DNA, 20 bp, Artificial
  Synthetically generated peptide
agccgcgcacgcctcaggca

SEQ ID NO: 3674 - DNA, 20 bp, Artificial
  Synthetically generated peptide
gccgcgcacgcctcaggcac

SEQ ID NO: 3675 - DNA, 20 bp, Artificial
  Synthetically generated peptide
ccgcgcacgcctcaggcaca

SEQ ID NO: 3676 - DNA, 20 bp, Artificial
  Synthetically generated peptide
cgcgcacgcctcaggcacag

SEQ ID NO: 3677 - DNA, 20 bp, Artificial
  Synthetically generated peptide
gcgcacgcctcaggcacagg

SEQ ID NO: 3678 - DNA, 20 bp, Artificial
  Synthetically generated peptide
cgcacgcctcaggcacaggg

SEQ ID NO: 3679 - DNA, 20 bp, Artificial
  Synthetically generated peptide
gcacgcctcaggcacagggg

SEQ ID NO: 3680 - DNA, 20 bp, Artificial
  Synthetically generated peptide
cacgcctcaggcacaggggg

SEQ ID NO: 3681 - DNA, 20 bp, Artificial
  Synthetically generated peptide
acgcctcaggcacagggggc

SEQ ID NO: 3682 - DNA, 20 bp, Artificial
  Synthetically generated peptide
cgcctcaggcacagggggct

SEQ ID NO: 3683 - DNA, 20 bp, Artificial
  Synthetically generated peptide
ctccgagccgcgcacgcctc

SEQ ID NO: 3684 - DNA, 20 bp, Artificial
  Synthetically generated peptide
gctccgagccgcgcacgcct

SEQ ID NO: 3685 - DNA, 20 bp, Artificial
  Synthetically generated peptide
ggctccgagccgcgcacgcc

SEQ ID NO: 3686 - DNA, 20 bp, Artificial
  Synthetically generated peptide
gggctccgagccgcgcacgc

SEQ ID NO: 3687 - DNA, 20 bp, Artificial
  Synthetically generated peptide
agggctccgagccgcgcacg

SEQ ID NO: 3688 - DNA, 20 bp, Artificial
  Synthetically generated peptide
cagggctccgagccgcgcac

SEQ ID NO: 3689 - DNA, 20 bp, Artificial
  Synthetically generated peptide
gcagggctccgagccgcgca

SEQ ID NO: 3690 - DNA, 20 bp, Artificial
  Synthetically generated peptide
ggcagggctccgagccgcgc

SEQ ID NO: 3691 - DNA, 20 bp, Artificial
  Synthetically generated peptide
gggcagggctccgagccgcg

SEQ ID NO: 3692 - DNA, 20 bp, Artificial
  Synthetically generated peptide
agggcagggctccgagccgc

SEQ ID NO: 3693 - DNA, 20 bp, Artificial
  Synthetically generated peptide
gagggcagggctccgagccg

SEQ ID NO: 3694 - DNA, 20 bp, Artificial
  Synthetically generated peptide
cgagggcagggctccgagcc

SEQ ID NO: 3695 - DNA, 20 bp, Artificial
  Synthetically generated peptide
ccgagggcagggctccgagc

SEQ ID NO: 3696 - DNA, 20 bp, Artificial
  Synthetically generated peptide
tccgagggcagggctccgag

SEQ ID NO: 3697 - DNA, 20 bp, Artificial
  Synthetically generated peptide
ctccgagggcagggctccga

SEQ ID NO: 3698 - DNA, 20 bp, Artificial
  Synthetically generated peptide
actccgagggcagggctccg

SEQ ID NO: 3699 - DNA, 20 bp, Artificial
  Synthetically generated peptide
gactccgagggcagggctcc

SEQ ID NO: 3700 - DNA, 20 bp, Artificial
  Synthetically generated peptide
ggactccgagggcagggctc

SEQ ID NO: 3701 - DNA, 20 bp, Artificial
  Synthetically generated peptide
aggactccgagggcagggct

SEQ ID NO: 3702 - DNA, 20 bp, Artificial
  Synthetically generated peptide
caggactccgagggcagggc

SEQ ID NO: 3703 - DNA, 22 bp, Artificial
  Synthetically generated peptide
caccaacggactccgtccgccc

SEQ ID NO: 3704 - DNA, 20 bp, Artificial
  Synthetically generated peptide
accaacggactccgtccgcc

SEQ ID NO: 3705 - DNA, 20 bp, Artificial
  Synthetically generated peptide
ccaacggactccgtccgccc

SEQ ID NO: 3706 - DNA, 20 bp, Artificial
  Synthetically generated peptide
caacggactccgtccgccct

SEQ ID NO: 3707 - DNA, 20 bp, Artificial
  Synthetically generated peptide
aacggactccgtccgccctt

SEQ ID NO: 3708 - DNA, 20 bp, Artificial
  Synthetically generated peptide
acggactccgtccgcccttc

SEQ ID NO: 3709 - DNA, 20 bp, Artificial
  Synthetically generated peptide
cggactccgtccgcccttcg

SEQ ID NO: 3710 - DNA, 20 bp, Artificial
  Synthetically generated peptide
ggactccgtccgcccttcgc

SEQ ID NO: 3711 - DNA, 20 bp, Artificial
  Synthetically generated peptide
gactccgtccgcccttcgct

SEQ ID NO: 3712 - DNA, 20 bp, Artificial
  Synthetically generated peptide
actccgtccgcccttcgctc

SEQ ID NO: 3713 - DNA, 20 bp, Artificial
  Synthetically generated peptide
ctccgtccgcccttcgctcg

SEQ ID NO: 3714 - DNA, 20 bp, Artificial
  Synthetically generated peptide
tccgtccgcccttcgctcgg

SEQ ID NO: 3715 - DNA, 20 bp, Artificial
  Synthetically generated peptide
ccgtccgcccttcgctcgga

SEQ ID NO: 3716 - DNA, 20 bp, Artificial
  Synthetically generated peptide
cgtccgcccttcgctcggat

SEQ ID NO: 3717 - DNA, 20 bp, Artificial
  Synthetically generated peptide
gtccgcccttcgctcggatg

SEQ ID NO: 3718 - DNA, 20 bp, Artificial
  Synthetically generated peptide
tccgcccttcgctcggatga

SEQ ID NO: 3719 - DNA, 20 bp, Artificial
  Synthetically generated peptide
ccgcccttcgctcggatgag

SEQ ID NO: 3720 - DNA, 20 bp, Artificial
  Synthetically generated peptide
cgcccttcgctcggatgagg

SEQ ID NO: 3721 - DNA, 20 bp, Artificial
  Synthetically generated peptide
gcccttcgctcggatgaggg

SEQ ID NO: 3722 - DNA, 20 bp, Artificial
  Synthetically generated peptide
cccttcgctcggatgaggga

SEQ ID NO: 3723 - DNA, 20 bp, Artificial
  Synthetically generated peptide
ccttcgctcggatgagggac

SEQ ID NO: 3724 - DNA, 20 bp, Artificial
  Synthetically generated peptide
cttcgctcggatgagggact

SEQ ID NO: 3725 - DNA, 20 bp, Artificial
  Synthetically generated peptide
ttcgctcggatgagggactc

SEQ ID NO: 3726 - DNA, 20 bp, Artificial
  Synthetically generated peptide
tcgctcggatgagggactca

SEQ ID NO: 3727 - DNA, 20 bp, Artificial
  Synthetically generated peptide
cgctcggatgagggactcaa

SEQ ID NO: 3728 - DNA, 20 bp, Artificial
  Synthetically generated peptide
gctcggatgagggactcaaa

SEQ ID NO: 3729 - DNA, 20 bp, Artificial
  Synthetically generated peptide
ctcggatgagggactcaaag

SEQ ID NO: 3730 - DNA, 20 bp, Artificial
  Synthetically generated peptide
tcggatgagggactcaaagc

SEQ ID NO: 3731 - DNA, 20 bp, Artificial
  Synthetically generated peptide
ccaccaacggactccgtccg

SEQ ID NO: 3732 - DNA, 20 bp, Artificial
  Synthetically generated peptide
cccaccaacggactccgtcc

SEQ ID NO: 3733 - DNA, 20 bp, Artificial
  Synthetically generated peptide
ccccaccaacggactccgtc

SEQ ID NO: 3734 - DNA, 20 bp, Artificial
  Synthetically generated peptide
cccccaccaacggactccgt

SEQ ID NO: 3735 - DNA, 20 bp, Artificial
  Synthetically generated peptide
acccccaccaacggactccg

SEQ ID NO: 3736 - DNA, 20 bp, Artificial
  Synthetically generated peptide
gacccccaccaacggactcc

SEQ ID NO: 3737 - DNA, 20 bp, Artificial
  Synthetically generated peptide
ggacccccaccaacggactc

SEQ ID NO: 3738 - DNA, 20 bp, Artificial
  Synthetically generated peptide
cggacccccaccaacggact

SEQ ID NO: 3739 - DNA, 20 bp, Artificial
  Synthetically generated peptide
ccggacccccaccaacggac

SEQ ID NO: 3740 - DNA, 20 bp, Artificial
  Synthetically generated peptide
accggacccccaccaacgga

SEQ ID NO: 3741 - DNA, 20 bp, Artificial
  Synthetically generated peptide
aaccggacccccaccaacgg

SEQ ID NO: 3742 - DNA, 20 bp, Artificial
  Synthetically generated peptide
caaccggacccccaccaacg

SEQ ID NO: 3743 - DNA, 20 bp, Artificial
  Synthetically generated peptide
gcaaccggacccccaccaac

SEQ ID NO: 3744 - DNA, 20 bp, Artificial
  Synthetically generated peptide
ggcaaccggacccccaccaa

SEQ ID NO: 3745 - DNA, 20 bp, Artificial
  Synthetically generated peptide
aggcaaccggacccccacca

SEQ ID NO: 3746 - DNA, 20 bp, Artificial
  Synthetically generated peptide
gaggcaaccggacccccacc

SEQ ID NO: 3747 - DNA, 20 bp, Artificial
  Synthetically generated peptide
agaggcaaccggacccccac

SEQ ID NO: 3748 - DNA, 20 bp, Artificial
  Synthetically generated peptide
gagaggcaaccggaccccca

SEQ ID NO: 3749 - DNA, 20 bp, Artificial
  Synthetically generated peptide
ggagaggcaaccggaccccc

SEQ ID NO: 3750 - DNA, 20 bp, Artificial
  Synthetically generated peptide
gggagaggcaaccggacccc

SEQ ID NO: 3751 - DNA, 20 bp, Artificial
  Synthetically generated peptide
cgggagaggcaaccggaccc

SEQ ID NO: 3752 - DNA, 20 bp, Artificial
  Synthetically generated peptide
ccgggagaggcaaccggacc

SEQ ID NO: 3753 - DNA, 20 bp, Artificial
  Synthetically generated peptide
cccgggagaggcaaccggac

SEQ ID NO: 3754 - DNA, 20 bp, Artificial
  Synthetically generated peptide
tcccgggagaggcaaccgga

SEQ ID NO: 3755 - DNA, 20 bp, Artificial
  Synthetically generated peptide
ctcccgggagaggcaaccgg

SEQ ID NO: 3756 - DNA, 20 bp, Artificial
  Synthetically generated peptide
gctcccgggagaggcaaccg

SEQ ID NO: 3757 - DNA, 20 bp, Artificial
  Synthetically generated peptide
agctcccgggagaggcaacc

SEQ ID NO: 3758 - DNA, 20 bp, Artificial
  Synthetically generated peptide
cagctcccgggagaggcaac

SEQ ID NO: 3759 - DNA, 20 bp, Artificial
  Synthetically generated peptide
acagctcccgggagaggcaa

SEQ ID NO: 3760 - DNA, 20 bp, Artificial
  Synthetically generated peptide
cacagctcccgggagaggca

SEQ ID NO: 3761 - DNA, 20 bp, Artificial
  Synthetically generated peptide
acacagctcccgggagaggc

SEQ ID NO: 3762 - DNA, 20 bp, Artificial
  Synthetically generated peptide
tacacagctcccgggagagg

SEQ ID NO: 3763 - DNA, 20 bp, Artificial
  Synthetically generated peptide
ctacacagctcccgggagag

SEQ ID NO: 3764 - DNA, 20 bp, Artificial
  Synthetically generated peptide
tctacacagctcccgggaga

SEQ ID NO: 3765 - DNA, 20 bp, Artificial
  Synthetically generated peptide
gtctacacagctcccgggag

SEQ ID NO: 3766 - DNA, 20 bp, Artificial
  Synthetically generated peptide
agtctacacagctcccggga

SEQ ID NO: 3767 - DNA, 20 bp, Artificial
  Synthetically generated peptide
aagtctacacagctcccggg

SEQ ID NO: 3768 - DNA, 20 bp, Artificial
  Synthetically generated peptide
gaagtctacacagctcccgg

SEQ ID NO: 3769 - DNA, 20 bp, Artificial
  Synthetically generated peptide
agaagtctacacagctcccg

SEQ ID NO: 3770 - DNA, 26 bp, Artificial
  Synthetically generated peptide
ccgccggctgcctcgctggcccagcg

SEQ ID NO: 3771 - DNA, 20 bp, Artificial
  Synthetically generated peptide
cgccggctgcctcgctggcc

SEQ ID NO: 3772 - DNA, 20 bp, Artificial
  Synthetically generated peptide
gccggctgcctcgctggccc

SEQ ID NO: 3773 - DNA, 20 bp, Artificial
  Synthetically generated peptide
ccggctgcctcgctggccca

SEQ ID NO: 3774 - DNA, 20 bp, Artificial
  Synthetically generated peptide
cggctgcctcgctggcccag

SEQ ID NO: 3775 - DNA, 20 bp, Artificial
  Synthetically generated peptide
ggctgcctcgctggcccagc

SEQ ID NO: 3776 - DNA, 20 bp, Artificial
  Synthetically generated peptide
gctgcctcgctggcccagcg

SEQ ID NO: 3777 - DNA, 20 bp, Artificial
  Synthetically generated peptide
ctgcctcgctggcccagcgc

SEQ ID NO: 3778 - DNA, 20 bp, Artificial
  Synthetically generated peptide
tgcctcgctggcccagcgcc

SEQ ID NO: 3779 - DNA, 20 bp, Artificial
  Synthetically generated peptide
gcctcgctggcccagcgccc

SEQ ID NO: 3780 - DNA, 20 bp, Artificial
  Synthetically generated peptide
cctcgctggcccagcgcccg

SEQ ID NO: 3781 - DNA, 20 bp, Artificial
  Synthetically generated peptide
ctcgctggcccagcgcccgg

SEQ ID NO: 3782 - DNA, 20 bp, Artificial
  Synthetically generated peptide
tcgctggcccagcgcccggg

SEQ ID NO: 3783 - DNA, 20 bp, Artificial
  Synthetically generated peptide
cgctggcccagcgcccgggg

SEQ ID NO: 3784 - DNA, 20 bp, Artificial
  Synthetically generated peptide
gctggcccagcgcccgggga

SEQ ID NO: 3785 - DNA, 20 bp, Artificial
  Synthetically generated peptide
ctggcccagcgcccggggag

SEQ ID NO: 3786 - DNA, 20 bp, Artificial
  Synthetically generated peptide
tggcccagcgcccggggagc

SEQ ID NO: 3787 - DNA, 20 bp, Artificial
  Synthetically generated peptide
ggcccagcgcccggggagcc

SEQ ID NO: 3788 - DNA, 20 bp, Artificial
  Synthetically generated peptide
gcccagcgcccggggagccc

SEQ ID NO: 3789 - DNA, 20 bp, Artificial
  Synthetically generated peptide
cccagcgcccggggagcccc

SEQ ID NO: 3790 - DNA, 20 bp, Artificial
  Synthetically generated peptide
ccagcgcccggggagcccca

SEQ ID NO: 3791 - DNA, 20 bp, Artificial
  Synthetically generated peptide
cagcgcccggggagccccac

SEQ ID NO: 3792 - DNA, 20 bp, Artificial
  Synthetically generated peptide
agcgcccggggagccccacg

SEQ ID NO: 3793 - DNA, 20 bp, Artificial
  Synthetically generated peptide
gcgcccggggagccccacgg

SEQ ID NO: 3794 - DNA, 20 bp, Artificial
  Synthetically generated peptide
cgcccggggagccccacggc

SEQ ID NO: 3795 - DNA, 20 bp, Artificial
  Synthetically generated peptide
gcccggggagccccacggcc

SEQ ID NO: 3796 - DNA, 20 bp, Artificial
  Synthetically generated peptide
cccggggagccccacggccc

SEQ ID NO: 3797 - DNA, 20 bp, Artificial
  Synthetically generated peptide
ccggggagccccacggcccg

SEQ ID NO: 3798 - DNA, 20 bp, Artificial
  Synthetically generated peptide
cggggagccccacggcccgc

SEQ ID NO: 3799 - DNA, 20 bp, Artificial
  Synthetically generated peptide
ggggagccccacggcccgca

SEQ ID NO: 3800 - DNA, 20 bp, Artificial
  Synthetically generated peptide
gggagccccacggcccgcag

SEQ ID NO: 3801 - DNA, 20 bp, Artificial
  Synthetically generated peptide
ggagccccacggcccgcagg

SEQ ID NO: 3802 - DNA, 20 bp, Artificial
  Synthetically generated peptide
gagccccacggcccgcaggg

SEQ ID NO: 3803 - DNA, 20 bp, Artificial
  Synthetically generated peptide
agccccacggcccgcagggg

SEQ ID NO: 3804 - DNA, 20 bp, Artificial
  Synthetically generated peptide
gccccacggcccgcaggggc

SEQ ID NO: 3805 - DNA, 20 bp, Artificial
  Synthetically generated peptide
ccccacggcccgcaggggca

SEQ ID NO: 3806 - DNA, 20 bp, Artificial
  Synthetically generated peptide
cccacggcccgcaggggcac

SEQ ID NO: 3807 - DNA, 20 bp, Artificial
  Synthetically generated peptide
ccacggcccgcaggggcacc

SEQ ID NO: 3808 - DNA, 20 bp, Artificial
  Synthetically generated peptide
cacggcccgcaggggcaccc

SEQ ID NO: 3809 - DNA, 20 bp, Artificial
  Synthetically generated peptide
acggcccgcaggggcacccc

SEQ ID NO: 3810 - DNA, 20 bp, Artificial
  Synthetically generated peptide
cggcccgcaggggcaccccg

SEQ ID NO: 3811 - DNA, 20 bp, Artificial
  Synthetically generated peptide
ggcccgcaggggcaccccga

SEQ ID NO: 3812 - DNA, 20 bp, Artificial
  Synthetically generated peptide
gcccgcaggggcaccccgag

SEQ ID NO: 3813 - DNA, 20 bp, Artificial
  Synthetically generated peptide
cccgcaggggcaccccgagc

SEQ ID NO: 3814 - DNA, 20 bp, Artificial
  Synthetically generated peptide
ccgcaggggcaccccgagcc

SEQ ID NO: 3815 - DNA, 20 bp, Artificial
  Synthetically generated peptide
cgcaggggcaccccgagccc

SEQ ID NO: 3816 - DNA, 20 bp, Artificial
  Synthetically generated peptide
gcaggggcaccccgagcccc

SEQ ID NO: 3817 - DNA, 20 bp, Artificial
  Synthetically generated peptide
caggggcaccccgagcccca

SEQ ID NO: 3818 - DNA, 20 bp, Artificial
  Synthetically generated peptide
aggggcaccccgagccccag

SEQ ID NO: 3819 - DNA, 20 bp, Artificial
  Synthetically generated peptide
ggggcaccccgagccccagc

SEQ ID NO: 3820 - DNA, 20 bp, Artificial
  Synthetically generated peptide
gggcaccccgagccccagct

SEQ ID NO: 3821 - DNA, 20 bp, Artificial
  Synthetically generated peptide
ggcaccccgagccccagctc

SEQ ID NO: 3822 - DNA, 20 bp, Artificial
  Synthetically generated peptide
gcaccccgagccccagctcc

SEQ ID NO: 3823 - DNA, 20 bp, Artificial
  Synthetically generated peptide
caccccgagccccagctcca

SEQ ID NO: 3824 - DNA, 20 bp, Artificial
  Synthetically generated peptide
accccgagccccagctccag

SEQ ID NO: 3825 - DNA, 20 bp, Artificial
  Synthetically generated peptide
ccccgagccccagctccagg

SEQ ID NO: 3826 - DNA, 20 bp, Artificial
  Synthetically generated peptide
cccgagccccagctccaggc

SEQ ID NO: 3827 - DNA, 20 bp, Artificial
  Synthetically generated peptide
ccgagccccagctccaggcc

SEQ ID NO: 3828 - DNA, 20 bp, Artificial
  Synthetically generated peptide
cgagccccagctccaggccc

SEQ ID NO: 3829 - DNA, 20 bp, Artificial
  Synthetically generated peptide
gagccccagctccaggcccg

SEQ ID NO: 3830 - DNA, 20 bp, Artificial
  Synthetically generated peptide
agccccagctccaggcccgg

SEQ ID NO: 3831 - DNA, 20 bp, Artificial
  Synthetically generated peptide
gccccagctccaggcccggc

SEQ ID NO: 3832 - DNA, 20 bp, Artificial
  Synthetically generated peptide
ccccagctccaggcccggcg

SEQ ID NO: 3833 - DNA, 20 bp, Artificial
  Synthetically generated peptide
cccagctccaggcccggcgg

SEQ ID NO: 3834 - DNA, 20 bp, Artificial
  Synthetically generated peptide
ccagctccaggcccggcggc

SEQ ID NO: 3835 - DNA, 20 bp, Artificial
  Synthetically generated peptide
cagctccaggcccggcggcg

SEQ ID NO: 3836 - DNA, 20 bp, Artificial
  Synthetically generated peptide
agctccaggcccggcggcgt

SEQ ID NO: 3837 - DNA, 20 bp, Artificial
  Synthetically generated peptide
gctccaggcccggcggcgtc

SEQ ID NO: 3838 - DNA, 20 bp, Artificial
  Synthetically generated peptide
ctccaggcccggcggcgtcc

SEQ ID NO: 3839 - DNA, 20 bp, Artificial
  Synthetically generated peptide
tccaggcccggcggcgtccc

SEQ ID NO: 3840 - DNA, 20 bp, Artificial
  Synthetically generated peptide
ccaggcccggcggcgtccct

SEQ ID NO: 3841 - DNA, 20 bp, Artificial
  Synthetically generated peptide
caggcccggcggcgtccctt

SEQ ID NO: 3842 - DNA, 20 bp, Artificial
  Synthetically generated peptide
aggcccggcggcgtcccttc

SEQ ID NO: 3843 - DNA, 20 bp, Artificial
  Synthetically generated peptide
ggcccggcggcgtcccttct

SEQ ID NO: 3844 - DNA, 20 bp, Artificial
  Synthetically generated peptide
gcccggcggcgtcccttctc

SEQ ID NO: 3845 - DNA, 20 bp, Artificial
  Synthetically generated peptide
cccggcggcgtcccttctct

SEQ ID NO: 3846 - DNA, 20 bp, Artificial
  Synthetically generated peptide
ccggcggcgtcccttctctc

SEQ ID NO: 3847 - DNA, 20 bp, Artificial
  Synthetically generated peptide
cggcggcgtcccttctctcg

SEQ ID NO: 3848 - DNA, 20 bp, Artificial
  Synthetically generated peptide
ggcggcgtcccttctctcgg

SEQ ID NO: 3849 - DNA, 20 bp, Artificial
  Synthetically generated peptide
gcggcgtcccttctctcggg

SEQ ID NO: 3850 - DNA, 20 bp, Artificial
  Synthetically generated peptide
cggcgtcccttctctcgggt

SEQ ID NO: 3851 - DNA, 20 bp, Artificial
  Synthetically generated peptide
ggcgtcccttctctcgggtc

SEQ ID NO: 3852 - DNA, 20 bp, Artificial
  Synthetically generated peptide
gcgtcccttctctcgggtcc

SEQ ID NO: 3853 - DNA, 20 bp, Artificial
  Synthetically generated peptide
cgtcccttctctcgggtccc

SEQ ID NO: 3854 - DNA, 20 bp, Artificial
  Synthetically generated peptide
gtcccttctctcgggtcccg

SEQ ID NO: 3855 - DNA, 20 bp, Artificial
  Synthetically generated peptide
tcccttctctcgggtcccgg

SEQ ID NO: 3856 - DNA, 20 bp, Artificial
  Synthetically generated peptide
cccttctctcgggtcccggc

SEQ ID NO: 3857 - DNA, 20 bp, Artificial
  Synthetically generated peptide
ccttctctcgggtcccggcc

SEQ ID NO: 3858 - DNA, 20 bp, Artificial
  Synthetically generated peptide
cttctctcgggtcccggcct

SEQ ID NO: 3859 - DNA, 20 bp, Artificial
  Synthetically generated peptide
ttctctcgggtcccggcctc

SEQ ID NO: 3860 - DNA, 20 bp, Artificial
  Synthetically generated peptide
tctctcgggtcccggcctcg

SEQ ID NO: 3861 - DNA, 20 bp, Artificial
  Synthetically generated peptide
ctctcgggtcccggcctcgc

SEQ ID NO: 3862 - DNA, 20 bp, Artificial
  Synthetically generated peptide
tctcgggtcccggcctcgcc

SEQ ID NO: 3863 - DNA, 20 bp, Artificial
  Synthetically generated peptide
ctcgggtcccggcctcgccc

SEQ ID NO: 3864 - DNA, 20 bp, Artificial
  Synthetically generated peptide
tcgggtcccggcctcgcccg

SEQ ID NO: 3865 - DNA, 20 bp, Artificial
  Synthetically generated peptide
cgggtcccggcctcgcccgg

SEQ ID NO: 3866 - DNA, 20 bp, Artificial
  Synthetically generated peptide
gggtcccggcctcgcccggc

SEQ ID NO: 3867 - DNA, 20 bp, Artificial
  Synthetically generated peptide
ggtcccggcctcgcccggcg

SEQ ID NO: 3868 - DNA, 20 bp, Artificial
  Synthetically generated peptide
gtcccggcctcgcccggcgg

SEQ ID NO: 3869 - DNA, 20 bp, Artificial
  Synthetically generated peptide
tcccggcctcgcccggcgga

SEQ ID NO: 3870 - DNA, 20 bp, Artificial
  Synthetically generated peptide
cccggcctcgcccggcggag

SEQ ID NO: 3871 - DNA, 20 bp, Artificial
  Synthetically generated peptide
ccggcctcgcccggcggagc

SEQ ID NO: 3872 - DNA, 20 bp, Artificial
  Synthetically generated peptide
cggcctcgcccggcggagcg

SEQ ID NO: 3873 - DNA, 20 bp, Artificial
  Synthetically generated peptide
ggcctcgcccggcggagcgg

SEQ ID NO: 3874 - DNA, 20 bp, Artificial
  Synthetically generated peptide
gcctcgcccggcggagcggc

SEQ ID NO: 3875 - DNA, 20 bp, Artificial
  Synthetically generated peptide
cctcgcccggcggagcggcc

SEQ ID NO: 3876 - DNA, 20 bp, Artificial
  Synthetically generated peptide
ctcgcccggcggagcggcct

SEQ ID NO: 3877 - DNA, 20 bp, Artificial
  Synthetically generated peptide
tcgcccggcggagcggcctc

SEQ ID NO: 3878 - DNA, 20 bp, Artificial
  Synthetically generated peptide
cgcccggcggagcggcctcc

SEQ ID NO: 3879 - DNA, 20 bp, Artificial
  Synthetically generated peptide
gcccggcggagcggcctccc

SEQ ID NO: 3880 - DNA, 20 bp, Artificial
  Synthetically generated peptide
cccggcggagcggcctcccc

SEQ ID NO: 3881 - DNA, 20 bp, Artificial
  Synthetically generated peptide
ccggcggagcggcctcccca

SEQ ID NO: 3882 - DNA, 20 bp, Artificial
  Synthetically generated peptide
cggcggagcggcctccccaa

SEQ ID NO: 3883 - DNA, 20 bp, Artificial
  Synthetically generated peptide
ggcggagcggcctccccaag

SEQ ID NO: 3884 - DNA, 20 bp, Artificial
  Synthetically generated peptide
gcggagcggcctccccaagg

SEQ ID NO: 3885 - DNA, 20 bp, Artificial
  Synthetically generated peptide
cggagcggcctccccaaggt

SEQ ID NO: 3886 - DNA, 20 bp, Artificial
  Synthetically generated peptide
ggagcggcctccccaaggtc

SEQ ID NO: 3887 - DNA, 20 bp, Artificial
  Synthetically generated peptide
gagcggcctccccaaggtca

SEQ ID NO: 3888 - DNA, 20 bp, Artificial
  Synthetically generated peptide
agcggcctccccaaggtcat

SEQ ID NO: 3889 - DNA, 20 bp, Artificial
  Synthetically generated peptide
gcggcctccccaaggtcatg

SEQ ID NO: 3890 - DNA, 20 bp, Artificial
  Synthetically generated peptide
cggcctccccaaggtcatga

SEQ ID NO: 3891 - DNA, 20 bp, Artificial
  Synthetically generated peptide
tccgccggctgcctcgctgg

SEQ ID NO: 3892 - DNA, 20 bp, Artificial
  Synthetically generated peptide
ctccgccggctgcctcgctg

SEQ ID NO: 3893 - DNA, 20 bp, Artificial
  Synthetically generated peptide
cctccgccggctgcctcgct

SEQ ID NO: 3894 - DNA, 20 bp, Artificial
  Synthetically generated peptide
acctccgccggctgcctcgc

SEQ ID NO: 3895 - DNA, 20 bp, Artificial
  Synthetically generated peptide
cacctccgccggctgcctcg

SEQ ID NO: 3896 - DNA, 20 bp, Artificial
  Synthetically generated peptide
gcacctccgccggctgcctc

SEQ ID NO: 3897 - DNA, 20 bp, Artificial
  Synthetically generated peptide
ggcacctccgccggctgcct

SEQ ID NO: 3898 - DNA, 20 bp, Artificial
  Synthetically generated peptide
gggcacctccgccggctgcc

SEQ ID NO: 3899 - DNA, 20 bp, Artificial
  Synthetically generated peptide
ggggcacctccgccggctgc

SEQ ID NO: 3900 - DNA, 20 bp, Artificial
  Synthetically generated peptide
cggggcacctccgccggctg

SEQ ID NO: 3901 - DNA, 20 bp, Artificial
  Synthetically generated peptide
ccggggcacctccgccggct

SEQ ID NO: 3902 - DNA, 20 bp, Artificial
  Synthetically generated peptide
cccggggcacctccgccggc

SEQ ID NO: 3903 - DNA, 20 bp, Artificial
  Synthetically generated peptide
ccccggggcacctccgccgg

SEQ ID NO: 3904 - DNA, 20 bp, Artificial
  Synthetically generated peptide
accccggggcacctccgccg

SEQ ID NO: 3905 - DNA, 20 bp, Artificial
  Synthetically generated peptide
aaccccggggcacctccgcc

SEQ ID NO: 3906 - DNA, 20 bp, Artificial
  Synthetically generated peptide
caaccccggggcacctccgc

SEQ ID NO: 3907 - DNA, 20 bp, Artificial
  Synthetically generated peptide
ccaaccccggggcacctccg

SEQ ID NO: 3908 - DNA, 20 bp, Artificial
  Synthetically generated peptide
tccaaccccggggcacctcc

SEQ ID NO: 3909 - DNA, 20 bp, Artificial
  Synthetically generated peptide
ctccaaccccggggcacctc

SEQ ID NO: 3910 - DNA, 20 bp, Artificial
  Synthetically generated peptide
tctccaaccccggggcacct

SEQ ID NO: 3911 - DNA, 20 bp, Artificial
  Synthetically generated peptide
ttctccaaccccggggcacc

SEQ ID NO: 3912 - DNA, 20 bp, Artificial
  Synthetically generated peptide
tttctccaaccccggggcac

SEQ ID NO: 3913 - DNA, 20 bp, Artificial
  Synthetically generated peptide
ctttctccaaccccggggca

SEQ ID NO: 3914 - DNA, 20 bp, Artificial
  Synthetically generated peptide
tctttctccaaccccggggc

SEQ ID NO: 3915 - DNA, 20 bp, Artificial
  Synthetically generated peptide
gtctttctccaaccccgggg

SEQ ID NO: 3916 - DNA, 20 bp, Artificial
  Synthetically generated peptide
agtctttctccaaccccggg

SEQ ID NO: 3917 - DNA, 20 bp, Artificial
  Synthetically generated peptide
gagtctttctccaaccccgg

SEQ ID NO: 3918 - DNA, 20 bp, Artificial
  Synthetically generated peptide
cgagtctttctccaaccccg

SEQ ID NO: 3919 - DNA, 20 bp, Artificial
  Synthetically generated peptide
gcgagtctttctccaacccc

SEQ ID NO: 3920 - DNA, 20 bp, Artificial
  Synthetically generated peptide
ggcgagtctttctccaaccc

SEQ ID NO: 3921 - DNA, 20 bp, Artificial
  Synthetically generated peptide
cggcgagtctttctccaacc

SEQ ID NO: 3922 - DNA, 20 bp, Artificial
  Synthetically generated peptide
gcggcgagtctttctccaac

SEQ ID NO: 3923 - DNA, 20 bp, Artificial
  Synthetically generated peptide
cgcggcgagtctttctccaa

SEQ ID NO: 3924 - DNA, 20 bp, Artificial
  Synthetically generated peptide
ccgcggcgagtctttctcca

SEQ ID NO: 3925 - DNA, 20 bp, Artificial
  Synthetically generated peptide
gccgcggcgagtctttctcc

SEQ ID NO: 3926 - DNA, 20 bp, Artificial
  Synthetically generated peptide
ggccgcggcgagtctttctc

SEQ ID NO: 3927 - DNA, 29 bp, Artificial
  Synthetically generated peptide
tctcgggtcccggcctcgcccggcggagc

SEQ ID NO: 3928 - DNA, 20 bp, Artificial
  Synthetically generated peptide
ctcgggtcccggcctcgccc

SEQ ID NO: 3929 - DNA, 20 bp, Artificial
  Synthetically generated peptide
tcgggtcccggcctcgcccg

SEQ ID NO: 3930 - DNA, 20 bp, Artificial
  Synthetically generated peptide
cgggtcccggcctcgcccgg

SEQ ID NO: 3931 - DNA, 20 bp, Artificial
  Synthetically generated peptide
gggtcccggcctcgcccggc

SEQ ID NO: 3932 - DNA, 20 bp, Artificial
  Synthetically generated peptide
ggtcccggcctcgcccggcg

SEQ ID NO: 3933 - DNA, 20 bp, Artificial
  Synthetically generated peptide
gtcccggcctcgcccggcgg

SEQ ID NO: 3934 - DNA, 20 bp, Artificial
  Synthetically generated peptide
tcccggcctcgcccggcgga

SEQ ID NO: 3935 - DNA, 20 bp, Artificial
  Synthetically generated peptide
cccggcctcgcccggcggag

SEQ ID NO: 3936 - DNA, 20 bp, Artificial
  Synthetically generated peptide
ccggcctcgcccggcggagc

SEQ ID NO: 3937 - DNA, 20 bp, Artificial
  Synthetically generated peptide
cggcctcgcccggcggagcg

SEQ ID NO: 3938 - DNA, 20 bp, Artificial
  Synthetically generated peptide
ggcctcgcccggcggagcgg

SEQ ID NO: 3939 - DNA, 20 bp, Artificial
  Synthetically generated peptide
gcctcgcccggcggagcggc

SEQ ID NO: 3940 - DNA, 20 bp, Artificial
  Synthetically generated peptide
cctcgcccggcggagcggcc

SEQ ID NO: 3941 - DNA, 20 bp, Artificial
  Synthetically generated peptide
ctcgcccggcggagcggcct

SEQ ID NO: 3942 - DNA, 20 bp, Artificial
  Synthetically generated peptide
tcgcccggcggagcggcctc

SEQ ID NO: 3943 - DNA, 20 bp, Artificial
  Synthetically generated peptide
cgcccggcggagcggcctcc

SEQ ID NO: 3944 - DNA, 20 bp, Artificial
  Synthetically generated peptide
gcccggcggagcggcctccc

SEQ ID NO: 3945 - DNA, 20 bp, Artificial
  Synthetically generated peptide
cccggcggagcggcctcccc

SEQ ID NO: 3946 - DNA, 20 bp, Artificial
  Synthetically generated peptide
ccggcggagcggcctcccca

SEQ ID NO: 3947 - DNA, 20 bp, Artificial
  Synthetically generated peptide
cggcggagcggcctccccaa

SEQ ID NO: 3948 - DNA, 20 bp, Artificial
  Synthetically generated peptide
ggcggagcggcctccccaag

SEQ ID NO: 3949 - DNA, 20 bp, Artificial
  Synthetically generated peptide
gcggagcggcctccccaagg

SEQ ID NO: 3950 - DNA, 20 bp, Artificial
  Synthetically generated peptide
cggagcggcctccccaaggt

SEQ ID NO: 3951 - DNA, 20 bp, Artificial
  Synthetically generated peptide
ggagcggcctccccaaggtc

SEQ ID NO: 3952 - DNA, 20 bp, Artificial
  Synthetically generated peptide
gagcggcctccccaaggtca

SEQ ID NO: 3953 - DNA, 20 bp, Artificial
  Synthetically generated peptide
agcggcctccccaaggtcat

SEQ ID NO: 3954 - DNA, 20 bp, Artificial
  Synthetically generated peptide
gcggcctccccaaggtcatg

SEQ ID NO: 3955 - DNA, 20 bp, Artificial
  Synthetically generated peptide
cggcctccccaaggtcatga

SEQ ID NO: 3956 - DNA, 20 bp, Artificial
  Synthetically generated peptide
ctctcgggtcccggcctcgc

SEQ ID NO: 3957 - DNA, 20 bp, Artificial
  Synthetically generated peptide
tctctcgggtcccggcctcg

SEQ ID NO: 3958 - DNA, 20 bp, Artificial
  Synthetically generated peptide
ttctctcgggtcccggcctc

SEQ ID NO: 3959 - DNA, 20 bp, Artificial
  Synthetically generated peptide
cttctctcgggtcccggcct

SEQ ID NO: 3960 - DNA, 20 bp, Artificial
  Synthetically generated peptide
ccttctctcgggtcccggcc

SEQ ID NO: 3961 - DNA, 20 bp, Artificial
  Synthetically generated peptide
cccttctctcgggtcccggc

SEQ ID NO: 3962 - DNA, 20 bp, Artificial
  Synthetically generated peptide
tcccttctctcgggtcccgg

SEQ ID NO: 3963 - DNA, 20 bp, Artificial
  Synthetically generated peptide
gtcccttctctcgggtcccg

SEQ ID NO: 3964 - DNA, 20 bp, Artificial
  Synthetically generated peptide
cgtcccttctctcgggtccc

SEQ ID NO: 3965 - DNA, 20 bp, Artificial
  Synthetically generated peptide
gcgtcccttctctcgggtcc

SEQ ID NO: 3966 - DNA, 20 bp, Artificial
  Synthetically generated peptide
ggcgtcccttctctcgggtc

SEQ ID NO: 3967 - DNA, 20 bp, Artificial
  Synthetically generated peptide
cggcgtcccttctctcgggt

SEQ ID NO: 3968 - DNA, 20 bp, Artificial
  Synthetically generated peptide
gcggcgtcccttctctcggg

SEQ ID NO: 3969 - DNA, 20 bp, Artificial
  Synthetically generated peptide
ggcggcgtcccttctctcgg

SEQ ID NO: 3970 - DNA, 20 bp, Artificial
  Synthetically generated peptide
cggcggcgtcccttctctcg

SEQ ID NO: 3971 - DNA, 20 bp, Artificial
  Synthetically generated peptide
ccggcggcgtcccttctctc

SEQ ID NO: 3972 - DNA, 20 bp, Artificial
  Synthetically generated peptide
cccggcggcgtcccttctct

SEQ ID NO: 3973 - DNA, 20 bp, Artificial
  Synthetically generated peptide
gcccggcggcgtcccttctc

SEQ ID NO: 3974 - DNA, 20 bp, Artificial
  Synthetically generated peptide
ggcccggcggcgtcccttct

SEQ ID NO: 3975 - DNA, 20 bp, Artificial
  Synthetically generated peptide
aggcccggcggcgtcccttc

SEQ ID NO: 3976 - DNA, 20 bp, Artificial
  Synthetically generated peptide
caggcccggcggcgtccctt

SEQ ID NO: 3977 - DNA, 20 bp, Artificial
  Synthetically generated peptide
ccaggcccggcggcgtccct

SEQ ID NO: 3978 - DNA, 20 bp, Artificial
  Synthetically generated peptide
tccaggcccggcggcgtccc

SEQ ID NO: 3979 - DNA, 20 bp, Artificial
  Synthetically generated peptide
ctccaggcccggcggcgtcc

SEQ ID NO: 3980 - DNA, 20 bp, Artificial
  Synthetically generated peptide
gctccaggcccggcggcgtc

SEQ ID NO: 3981 - DNA, 20 bp, Artificial
  Synthetically generated peptide
agctccaggcccggcggcgt

SEQ ID NO: 3982 - DNA, 20 bp, Artificial
  Synthetically generated peptide
cagctccaggcccggcggcg

SEQ ID NO: 3983 - DNA, 20 bp, Artificial
  Synthetically generated peptide
ccagctccaggcccggcggc

SEQ ID NO: 3984 - DNA, 20 bp, Artificial
  Synthetically generated peptide
cccagctccaggcccggcgg

SEQ ID NO: 3985 - DNA, 20 bp, Artificial
  Synthetically generated peptide
ccccagctccaggcccggcg

SEQ ID NO: 3986 - DNA, 20 bp, Artificial
  Synthetically generated peptide
gccccagctccaggcccggc

SEQ ID NO: 3987 - DNA, 20 bp, Artificial
  Synthetically generated peptide
agccccagctccaggcccgg

SEQ ID NO: 3988 - DNA, 20 bp, Artificial
  Synthetically generated peptide
gagccccagctccaggcccg

SEQ ID NO: 3989 - DNA, 20 bp, Artificial
  Synthetically generated peptide
cgagccccagctccaggccc

SEQ ID NO: 3990 - DNA, 20 bp, Artificial
  Synthetically generated peptide
ccgagccccagctccaggcc

SEQ ID NO: 3991 - DNA, 20 bp, Artificial
  Synthetically generated peptide
cccgagccccagctccaggc

SEQ ID NO: 3992 - DNA, 20 bp, Artificial
  Synthetically generated peptide
ccccgagccccagctccagg

SEQ ID NO: 3993 - DNA, 20 bp, Artificial
  Synthetically generated peptide
accccgagccccagctccag

SEQ ID NO: 3994 - DNA, 20 bp, Artificial
  Synthetically generated peptide
caccccgagccccagctcca

SEQ ID NO: 3995 - DNA, 20 bp, Artificial
  Synthetically generated peptide
gcaccccgagccccagctcc

SEQ ID NO: 3996 - DNA, 20 bp, Artificial
  Synthetically generated peptide
ggcaccccgagccccagctc

SEQ ID NO: 3997 - DNA, 20 bp, Artificial
  Synthetically generated peptide
gggcaccccgagccccagct

SEQ ID NO: 3998 - DNA, 20 bp, Artificial
  Synthetically generated peptide
ggggcaccccgagccccagc

SEQ ID NO: 3999 - DNA, 20 bp, Artificial
  Synthetically generated peptide
aggggcaccccgagccccag

SEQ ID NO: 4000 - DNA, 20 bp, Artificial
  Synthetically generated peptide
caggggcaccccgagcccca

SEQ ID NO: 4001 - DNA, 20 bp, Artificial
  Synthetically generated peptide
gcaggggcaccccgagcccc

SEQ ID NO: 4002 - DNA, 20 bp, Artificial
  Synthetically generated peptide
cgcaggggcaccccgagccc

SEQ ID NO: 4003 - DNA, 20 bp, Artificial
  Synthetically generated peptide
ccgcaggggcaccccgagcc

SEQ ID NO: 4004 - DNA, 20 bp, Artificial
  Synthetically generated peptide
cccgcaggggcaccccgagc

SEQ ID NO: 4005 - DNA, 20 bp, Artificial
  Synthetically generated peptide
gcccgcaggggcaccccgag

SEQ ID NO: 4006 - DNA, 20 bp, Artificial
  Synthetically generated peptide
ggcccgcaggggcaccccga

SEQ ID NO: 4007 - DNA, 20 bp, Artificial
  Synthetically generated peptide
cggcccgcaggggcaccccg

SEQ ID NO: 4008 - DNA, 20 bp, Artificial
  Synthetically generated peptide
acggcccgcaggggcacccc

SEQ ID NO: 4009 - DNA, 20 bp, Artificial
  Synthetically generated peptide
cacggcccgcaggggcaccc

SEQ ID NO: 4010 - DNA, 20 bp, Artificial
  Synthetically generated peptide
ccacggcccgcaggggcacc

SEQ ID NO: 4011 - DNA, 20 bp, Artificial
  Synthetically generated peptide
cccacggcccgcaggggcac

SEQ ID NO: 4012 - DNA, 20 bp, Artificial
  Synthetically generated peptide
ccccacggcccgcaggggca

SEQ ID NO: 4013 - DNA, 20 bp, Artificial
  Synthetically generated peptide
gccccacggcccgcaggggc

SEQ ID NO: 4014 - DNA, 20 bp, Artificial
  Synthetically generated peptide
agccccacggcccgcagggg

SEQ ID NO: 4015 - DNA, 20 bp, Artificial
  Synthetically generated peptide
gagccccacggcccgcaggg

SEQ ID NO: 4016 - DNA, 20 bp, Artificial
  Synthetically generated peptide
ggagccccacggcccgcagg

SEQ ID NO: 4017 - DNA, 20 bp, Artificial
  Synthetically generated peptide
gggagccccacggcccgcag

SEQ ID NO: 4018 - DNA, 20 bp, Artificial
  Synthetically generated peptide
ggggagccccacggcccgca

SEQ ID NO: 4019 - DNA, 20 bp, Artificial
  Synthetically generated peptide
cggggagccccacggcccgc

SEQ ID NO: 4020 - DNA, 20 bp, Artificial
  Synthetically generated peptide
ccggggagccccacggcccg

SEQ ID NO: 4021 - DNA, 20 bp, Artificial
  Synthetically generated peptide
cccggggagccccacggccc

SEQ ID NO: 4022 - DNA, 20 bp, Artificial
  Synthetically generated peptide
gcccggggagccccacggcc

SEQ ID NO: 4023 - DNA, 20 bp, Artificial
  Synthetically generated peptide
cgcccggggagccccacggc

SEQ ID NO: 4024 - DNA, 20 bp, Artificial
  Synthetically generated peptide
gcgcccggggagccccacgg

SEQ ID NO: 4025 - DNA, 20 bp, Artificial
  Synthetically generated peptide
agcgcccggggagccccacg

SEQ ID NO: 4026 - DNA, 20 bp, Artificial
  Synthetically generated peptide
cagcgcccggggagccccac

SEQ ID NO: 4027 - DNA, 20 bp, Artificial
  Synthetically generated peptide
ccagcgcccggggagcccca

SEQ ID NO: 4028 - DNA, 20 bp, Artificial
  Synthetically generated peptide
cccagcgcccggggagcccc

SEQ ID NO: 4029 - DNA, 20 bp, Artificial
  Synthetically generated peptide
gcccagcgcccggggagccc

SEQ ID NO: 4030 - DNA, 20 bp, Artificial
  Synthetically generated peptide
ggcccagcgcccggggagcc

SEQ ID NO: 4031 - DNA, 20 bp, Artificial
  Synthetically generated peptide
tggcccagcgcccggggagc

SEQ ID NO: 4032 - DNA, 20 bp, Artificial
  Synthetically generated peptide
ctggcccagcgcccggggag

SEQ ID NO: 4033 - DNA, 20 bp, Artificial
  Synthetically generated peptide
gctggcccagcgcccgggga

SEQ ID NO: 4034 - DNA, 20 bp, Artificial
  Synthetically generated peptide
cgctggcccagcgcccgggg

SEQ ID NO: 4035 - DNA, 20 bp, Artificial
  Synthetically generated peptide
tcgctggcccagcgcccggg

SEQ ID NO: 4036 - DNA, 20 bp, Artificial
  Synthetically generated peptide
ctcgctggcccagcgcccgg

SEQ ID NO: 4037 - DNA, 20 bp, Artificial
  Synthetically generated peptide
cctcgctggcccagcgcccg

SEQ ID NO: 4038 - DNA, 20 bp, Artificial
  Synthetically generated peptide
gcctcgctggcccagcgccc

SEQ ID NO: 4039 - DNA, 20 bp, Artificial
  Synthetically generated peptide
tgcctcgctggcccagcgcc

SEQ ID NO: 4040 - DNA, 20 bp, Artificial
  Synthetically generated peptide
ctgcctcgctggcccagcgc

SEQ ID NO: 4041 - DNA, 20 bp, Artificial
  Synthetically generated peptide
gctgcctcgctggcccagcg

SEQ ID NO: 4042 - DNA, 20 bp, Artificial
  Synthetically generated peptide
ggctgcctcgctggcccagc

SEQ ID NO: 4043 - DNA, 20 bp, Artificial
  Synthetically generated peptide
cggctgcctcgctggcccag

SEQ ID NO: 4044 - DNA, 20 bp, Artificial
  Synthetically generated peptide
ccggctgcctcgctggccca

SEQ ID NO: 4045 - DNA, 20 bp, Artificial
  Synthetically generated peptide
gccggctgcctcgctggccc

SEQ ID NO: 4046 - DNA, 20 bp, Artificial
  Synthetically generated peptide
cgccggctgcctcgctggcc

SEQ ID NO: 4047 - DNA, 20 bp, Artificial
  Synthetically generated peptide
ccgccggctgcctcgctggc

SEQ ID NO: 4048 - DNA, 20 bp, Artificial
  Synthetically generated peptide
tccgccggctgcctcgctgg

SEQ ID NO: 4049 - DNA, 20 bp, Artificial
  Synthetically generated peptide
ctccgccggctgcctcgctg

SEQ ID NO: 4050 - DNA, 20 bp, Artificial
  Synthetically generated peptide
cctccgccggctgcctcgct

SEQ ID NO: 4051 - DNA, 20 bp, Artificial
  Synthetically generated peptide
acctccgccggctgcctcgc

SEQ ID NO: 4052 - DNA, 20 bp, Artificial
  Synthetically generated peptide
cacctccgccggctgcctcg

SEQ ID NO: 4053 - DNA, 20 bp, Artificial
  Synthetically generated peptide
gcacctccgccggctgcctc

SEQ ID NO: 4054 - DNA, 20 bp, Artificial
  Synthetically generated peptide
ggcacctccgccggctgcct

SEQ ID NO: 4055 - DNA, 20 bp, Artificial
  Synthetically generated peptide
gggcacctccgccggctgcc

SEQ ID NO: 4056 - DNA, 20 bp, Artificial
  Synthetically generated peptide
ggggcacctccgccggctgc

SEQ ID NO: 4057 - DNA, 20 bp, Artificial
  Synthetically generated peptide
cggggcacctccgccggctg

SEQ ID NO: 4058 - DNA, 20 bp, Artificial
  Synthetically generated peptide
ccggggcacctccgccggct

SEQ ID NO: 4059 - DNA, 20 bp, Artificial
  Synthetically generated peptide
cccggggcacctccgccggc

SEQ ID NO: 4060 - DNA, 20 bp, Artificial
  Synthetically generated peptide
ccccggggcacctccgccgg

SEQ ID NO: 4061 - DNA, 20 bp, Artificial
  Synthetically generated peptide
accccggggcacctccgccg

SEQ ID NO: 4062 - DNA, 20 bp, Artificial
  Synthetically generated peptide
aaccccggggcacctccgcc

SEQ ID NO: 4063 - DNA, 20 bp, Artificial
  Synthetically generated peptide
caaccccggggcacctccgc

SEQ ID NO: 4064 - DNA, 20 bp, Artificial
  Synthetically generated peptide
ccaaccccggggcacctccg

SEQ ID NO: 4065 - DNA, 20 bp, Artificial
  Synthetically generated peptide
tccaaccccggggcacctcc

SEQ ID NO: 4066 - DNA, 20 bp, Artificial
  Synthetically generated peptide
ctccaaccccggggcacctc

SEQ ID NO: 4067 - DNA, 20 bp, Artificial
  Synthetically generated peptide
tctccaaccccggggcacct

SEQ ID NO: 4068 - DNA, 20 bp, Artificial
  Synthetically generated peptide
ttctccaaccccggggcacc

SEQ ID NO: 4069 - DNA, 20 bp, Artificial
  Synthetically generated peptide
tttctccaaccccggggcac

SEQ ID NO: 4070 - DNA, 20 bp, Artificial
  Synthetically generated peptide
ctttctccaaccccggggca

SEQ ID NO: 4071 - DNA, 20 bp, Artificial
  Synthetically generated peptide
tctttctccaaccccggggc

SEQ ID NO: 4072 - DNA, 20 bp, Artificial
  Synthetically generated peptide
gtctttctccaaccccgggg

SEQ ID NO: 4073 - DNA, 20 bp, Artificial
  Synthetically generated peptide
agtctttctccaaccccggg

SEQ ID NO: 4074 - DNA, 20 bp, Artificial
  Synthetically generated peptide
gagtctttctccaaccccgg

SEQ ID NO: 4075 - DNA, 20 bp, Artificial
  Synthetically generated peptide
cgagtctttctccaaccccg

SEQ ID NO: 4076 - DNA, 20 bp, Artificial
  Synthetically generated peptide
gcgagtctttctccaacccc

SEQ ID NO: 4077 - DNA, 20 bp, Artificial
  Synthetically generated peptide
ggcgagtctttctccaaccc

SEQ ID NO: 4078 - DNA, 20 bp, Artificial
  Synthetically generated peptide
cggcgagtctttctccaacc

SEQ ID NO: 4079 - DNA, 20 bp, Artificial
  Synthetically generated peptide
gcggcgagtctttctccaac

SEQ ID NO: 4080 - DNA, 20 bp, Artificial
  Synthetically generated peptide
cgcggcgagtctttctccaa

SEQ ID NO: 4081 - DNA, 20 bp, Artificial
  Synthetically generated peptide
ccgcggcgagtctttctcca

SEQ ID NO: 4082 - DNA, 20 bp, Artificial
  Synthetically generated peptide
gccgcggcgagtctttctcc

SEQ ID NO: 4083 - DNA, 20 bp, Artificial
  Synthetically generated peptide
ggccgcggcgagtctttctc

SEQ ID NO: 4084 - DNA, 25 bp, Artificial
  Synthetically generated peptide
cattctggcggcgccgcggctcgcg

SEQ ID NO: 4085 - DNA, 20 bp, Artificial
  Synthetically generated peptide
attctggcggcgccgcggct

SEQ ID NO: 4086 - DNA, 20 bp, Artificial
  Synthetically generated peptide
ttctggcggcgccgcggctc

SEQ ID NO: 4087 - DNA, 20 bp, Artificial
  Synthetically generated peptide
tctggcggcgccgcggctcg

SEQ ID NO: 4088 - DNA, 20 bp, Artificial
  Synthetically generated peptide
ctggcggcgccgcggctcgc

SEQ ID NO: 4089 - DNA, 20 bp, Artificial
  Synthetically generated peptide
tggcggcgccgcggctcgcg

SEQ ID NO: 4090 - DNA, 20 bp, Artificial
  Synthetically generated peptide
ggcggcgccgcggctcgcgc

SEQ ID NO: 4091 - DNA, 20 bp, Artificial
  Synthetically generated peptide
gcggcgccgcggctcgcgcc

SEQ ID NO: 4092 - DNA, 20 bp, Artificial
  Synthetically generated peptide
cggcgccgcggctcgcgccc

SEQ ID NO: 4093 - DNA, 20 bp, Artificial
  Synthetically generated peptide
ggcgccgcggctcgcgcccc

SEQ ID NO: 4094 - DNA, 20 bp, Artificial
  Synthetically generated peptide
gcgccgcggctcgcgccccg

SEQ ID NO: 4095 - DNA, 20 bp, Artificial
  Synthetically generated peptide
cgccgcggctcgcgccccgg

SEQ ID NO: 4096 - DNA, 20 bp, Artificial
  Synthetically generated peptide
gccgcggctcgcgccccggc

SEQ ID NO: 4097 - DNA, 20 bp, Artificial
  Synthetically generated peptide
ccgcggctcgcgccccggcc

SEQ ID NO: 4098 - DNA, 20 bp, Artificial
  Synthetically generated peptide
cgcggctcgcgccccggccc

SEQ ID NO: 4099 - DNA, 20 bp, Artificial
  Synthetically generated peptide
gcggctcgcgccccggcccg

SEQ ID NO: 4100 - DNA, 20 bp, Artificial
  Synthetically generated peptide
cggctcgcgccccggcccga

SEQ ID NO: 4101 - DNA, 20 bp, Artificial
  Synthetically generated peptide
ggctcgcgccccggcccgac

SEQ ID NO: 4102 - DNA, 20 bp, Artificial
  Synthetically generated peptide
gctcgcgccccggcccgacc

SEQ ID NO: 4103 - DNA, 20 bp, Artificial
  Synthetically generated peptide
ccattctggcggcgccgcgg

SEQ ID NO: 4104 - DNA, 20 bp, Artificial
  Synthetically generated peptide
tccattctggcggcgccgcg

SEQ ID NO: 4105 - DNA, 20 bp, Artificial
  Synthetically generated peptide
ctccattctggcggcgccgc

SEQ ID NO: 4106 - DNA, 20 bp, Artificial
  Synthetically generated peptide
cctccattctggcggcgccg

SEQ ID NO: 4107 - DNA, 20 bp, Artificial
  Synthetically generated peptide
tcctccattctggcggcgcc

SEQ ID NO: 4108 - DNA, 20 bp, Artificial
  Synthetically generated peptide
ctcctccattctggcggcgc

SEQ ID NO: 4109 - DNA, 20 bp, Artificial
  Synthetically generated peptide
gctcctccattctggcggcg

SEQ ID NO: 4110 - DNA, 20 bp, Artificial
  Synthetically generated peptide
cgctcctccattctggcggc

SEQ ID NO: 4111 - DNA, 20 bp, Artificial
  Synthetically generated peptide
ccgctcctccattctggcgg

SEQ ID NO: 4112 - DNA, 20 bp, Artificial
  Synthetically generated peptide
cccgctcctccattctggcg

SEQ ID NO: 4113 - DNA, 20 bp, Artificial
  Synthetically generated peptide
tcccgctcctccattctggc

SEQ ID NO: 4114 - DNA, 20 bp, Artificial
  Synthetically generated peptide
ctcccgctcctccattctgg

SEQ ID NO: 4115 - DNA, 20 bp, Artificial
  Synthetically generated peptide
gctcccgctcctccattctg

SEQ ID NO: 4116 - DNA, 20 bp, Artificial
  Synthetically generated peptide
tgctcccgctcctccattct

SEQ ID NO: 4117 - DNA, 20 bp, Artificial
  Synthetically generated peptide
ctgctcccgctcctccattc

SEQ ID NO: 4118 - DNA, 20 bp, Artificial
  Synthetically generated peptide
cctgctcccgctcctccatt

SEQ ID NO: 4119 - DNA, 20 bp, Artificial
  Synthetically generated peptide
tcctgctcccgctcctccat

SEQ ID NO: 4120 - DNA, 20 bp, Artificial
  Synthetically generated peptide
ttcctgctcccgctcctcca

SEQ ID NO: 4121 - DNA, 20 bp, Artificial
  Synthetically generated peptide
cttcctgctcccgctcctcc

SEQ ID NO: 4122 - DNA, 20 bp, Artificial
  Synthetically generated peptide
acttcctgctcccgctcctc

SEQ ID NO: 4123 - DNA, 20 bp, Artificial
  Synthetically generated peptide
cacttcctgctcccgctcct

SEQ ID NO: 4124 - DNA, 20 bp, Artificial
  Synthetically generated peptide
ccacttcctgctcccgctcc

SEQ ID NO: 4125 - DNA, 20 bp, Artificial
  Synthetically generated peptide
gccacttcctgctcccgctc

SEQ ID NO: 4126 - DNA, 20 bp, Artificial
  Synthetically generated peptide
ggccacttcctgctcccgct

SEQ ID NO: 4127 - DNA, 20 bp, Artificial
  Synthetically generated peptide
cggccacttcctgctcccgc

SEQ ID NO: 4128 - DNA, 20 bp, Artificial
  Synthetically generated peptide
tcggccacttcctgctcccg

SEQ ID NO: 4129 - DNA, 20 bp, Artificial
  Synthetically generated peptide
ctcggccacttcctgctccc

SEQ ID NO: 4130 - DNA, 20 bp, Artificial
  Synthetically generated peptide
gctcggccacttcctgctcc

SEQ ID NO: 4131 - DNA, 20 bp, Artificial
  Synthetically generated peptide
cgctcggccacttcctgctc

SEQ ID NO: 4132 - DNA, 20 bp, Artificial
  Synthetically generated peptide
ccgctcggccacttcctgct

SEQ ID NO: 4133 - DNA, 20 bp, Artificial
  Synthetically generated peptide
cccgctcggccacttcctgc

SEQ ID NO: 4134 - DNA, 20 bp, Artificial
  Synthetically generated peptide
gcccgctcggccacttcctg

SEQ ID NO: 4135 - DNA, 20 bp, Artificial
  Synthetically generated peptide
ggcccgctcggccacttcct

SEQ ID NO: 4136 - DNA, 20 bp, Artificial
  Synthetically generated peptide
aggcccgctcggccacttcc

SEQ ID NO: 4137 - DNA, 20 bp, Artificial
  Synthetically generated peptide
caggcccgctcggccacttc

SEQ ID NO: 4138 - DNA, 20 bp, Artificial
  Synthetically generated peptide
ccaggcccgctcggccactt

SEQ ID NO: 4139 - DNA, 20 bp, Artificial
  Synthetically generated peptide
cccaggcccgctcggccact

SEQ ID NO: 4140 - DNA, 20 bp, Artificial
  Synthetically generated peptide
gcccaggcccgctcggccac

SEQ ID NO: 4141 - DNA, 20 bp, Artificial
  Synthetically generated peptide
cgcccaggcccgctcggcca

SEQ ID NO: 4142 - DNA, 20 bp, Artificial
  Synthetically generated peptide
ccgcccaggcccgctcggcc

SEQ ID NO: 4143 - DNA, 20 bp, Artificial
  Synthetically generated peptide
cccgcccaggcccgctcggc

SEQ ID NO: 4144 - DNA, 20 bp, Artificial
  Synthetically generated peptide
ccccgcccaggcccgctcgg

SEQ ID NO: 4145 - DNA, 20 bp, Artificial
  Synthetically generated peptide
tccccgcccaggcccgctcg

SEQ ID NO: 4146 - DNA, 20 bp, Artificial
  Synthetically generated peptide
ctccccgcccaggcccgctc

SEQ ID NO: 4147 - DNA, 20 bp, Artificial
  Synthetically generated peptide
cctccccgcccaggcccgct

SEQ ID NO: 4148 - DNA, 20 bp, Artificial
  Synthetically generated peptide
ccctccccgcccaggcccgc

SEQ ID NO: 4149 - DNA, 20 bp, Artificial
  Synthetically generated peptide
gccctccccgcccaggcccg

SEQ ID NO: 4150 - DNA, 20 bp, Artificial
  Synthetically generated peptide
cgccctccccgcccaggccc

SEQ ID NO: 4151 - DNA, 20 bp, Artificial
  Synthetically generated peptide
gcgccctccccgcccaggcc

SEQ ID NO: 4152 - DNA, 20 bp, Artificial
  Synthetically generated peptide
cgcgccctccccgcccaggc

SEQ ID NO: 4153 - DNA, 20 bp, Artificial
  Synthetically generated peptide
ccgcgccctccccgcccagg

SEQ ID NO: 4154 - DNA, 20 bp, Artificial
  Synthetically generated peptide
cccgcgccctccccgcccag

SEQ ID NO: 4155 - DNA, 20 bp, Artificial
  Synthetically generated peptide
ccccgcgccctccccgccca

SEQ ID NO: 4156 - DNA, 20 bp, Artificial
  Synthetically generated peptide
gccccgcgccctccccgccc

SEQ ID NO: 4157 - DNA, 20 bp, Artificial
  Synthetically generated peptide
cgccccgcgccctccccgcc

SEQ ID NO: 4158 - DNA, 20 bp, Artificial
  Synthetically generated peptide
gcgccccgcgccctccccgc

SEQ ID NO: 4159 - DNA, 20 bp, Artificial
  Synthetically generated peptide
cgcgccccgcgccctccccg

SEQ ID NO: 4160 - DNA, 20 bp, Artificial
  Synthetically generated peptide
gcgcgccccgcgccctcccc

SEQ ID NO: 4161 - DNA, 20 bp, Artificial
  Synthetically generated peptide
cgcgcgccccgcgccctccc

SEQ ID NO: 4162 - DNA, 20 bp, Artificial
  Synthetically generated peptide
ccgcgcgccccgcgccctcc

SEQ ID NO: 4163 - DNA, 20 bp, Artificial
  Synthetically generated peptide
cccgcgcgccccgcgccctc

SEQ ID NO: 4164 - DNA, 20 bp, Artificial
  Synthetically generated peptide
gcccgcgcgccccgcgccct

SEQ ID NO: 4165 - DNA, 20 bp, Artificial
  Synthetically generated peptide
ggcccgcgcgccccgcgccc

SEQ ID NO: 4166 - DNA, 20 bp, Artificial
  Synthetically generated peptide
gggcccgcgcgccccgcgcc

SEQ ID NO: 4167 - DNA, 20 bp, Artificial
  Synthetically generated peptide
cgggcccgcgcgccccgcgc

SEQ ID NO: 4168 - DNA, 20 bp, Artificial
  Synthetically generated peptide
ccgggcccgcgcgccccgcg

SEQ ID NO: 4169 - DNA, 20 bp, Artificial
  Synthetically generated peptide
gccgggcccgcgcgccccgc

SEQ ID NO: 4170 - DNA, 20 bp, Artificial
  Synthetically generated peptide
ggccgggcccgcgcgccccg

SEQ ID NO: 4171 - DNA, 20 bp, Artificial
  Synthetically generated peptide
tggccgggcccgcgcgcccc

SEQ ID NO: 4172 - DNA, 20 bp, Artificial
  Synthetically generated peptide
ttggccgggcccgcgcgccc

SEQ ID NO: 4173 - DNA, 20 bp, Artificial
  Synthetically generated peptide
cttggccgggcccgcgcgcc

SEQ ID NO: 4174 - DNA, 20 bp, Artificial
  Synthetically generated peptide
ccttggccgggcccgcgcgc

SEQ ID NO: 4175 - DNA, 20 bp, Artificial
  Synthetically generated peptide
cccttggccgggcccgcgcg

SEQ ID NO: 4176 - DNA, 20 bp, Artificial
  Synthetically generated peptide
tcccttggccgggcccgcgc

SEQ ID NO: 4177 - DNA, 20 bp, Artificial
  Synthetically generated peptide
ctcccttggccgggcccgcg

SEQ ID NO: 4178 - DNA, 20 bp, Artificial
  Synthetically generated peptide
cctcccttggccgggcccgc

SEQ ID NO: 4179 - DNA, 20 bp, Artificial
  Synthetically generated peptide
ccctcccttggccgggcccg

SEQ ID NO: 4180 - DNA, 20 bp, Artificial
  Synthetically generated peptide
gccctcccttggccgggccc

SEQ ID NO: 4181 - DNA, 20 bp, Artificial
  Synthetically generated peptide
cgccctcccttggccgggcc

SEQ ID NO: 4182 - DNA, 20 bp, Artificial
  Synthetically generated peptide
ccgccctcccttggccgggc

SEQ ID NO: 4183 - DNA, 20 bp, Artificial
  Synthetically generated peptide
gccgccctcccttggccggg

SEQ ID NO: 4184 - DNA, 20 bp, Artificial
  Synthetically generated peptide
ggccgccctcccttggccgg

SEQ ID NO: 4185 - DNA, 20 bp, Artificial
  Synthetically generated peptide
gggccgccctcccttggccg

SEQ ID NO: 4186 - DNA, 20 bp, Artificial
  Synthetically generated peptide
ggggccgccctcccttggcc

SEQ ID NO: 4187 - DNA, 20 bp, Artificial
  Synthetically generated peptide
tggggccgccctcccttggc

SEQ ID NO: 4188 - DNA, 20 bp, Artificial
  Synthetically generated peptide
gtggggccgccctcccttgg

SEQ ID NO: 4189 - DNA, 20 bp, Artificial
  Synthetically generated peptide
cgtggggccgccctcccttg

SEQ ID NO: 4190 - DNA, 20 bp, Artificial
  Synthetically generated peptide
gcgtggggccgccctccctt

SEQ ID NO: 4191 - DNA, 20 bp, Artificial
  Synthetically generated peptide
ggcgtggggccgccctccct

SEQ ID NO: 4192 - DNA, 20 bp, Artificial
  Synthetically generated peptide
cggcgtggggccgccctccc

SEQ ID NO: 4193 - DNA, 20 bp, Artificial
  Synthetically generated peptide
ccggcgtggggccgccctcc

SEQ ID NO: 4194 - DNA, 20 bp, Artificial
  Synthetically generated peptide
cccggcgtggggccgccctc

SEQ ID NO: 4195 - DNA, 20 bp, Artificial
  Synthetically generated peptide
gcccggcgtggggccgccct

SEQ ID NO: 4196 - DNA, 20 bp, Artificial
  Synthetically generated peptide
cgcccggcgtggggccgccc

SEQ ID NO: 4197 - DNA, 20 bp, Artificial
  Synthetically generated peptide
gcgcccggcgtggggccgcc

SEQ ID NO: 4198 - DNA, 20 bp, Artificial
  Synthetically generated peptide
ggcgcccggcgtggggccgc

SEQ ID NO: 4199 - DNA, 20 bp, Artificial
  Synthetically generated peptide
cggcgcccggcgtggggccg

SEQ ID NO: 4200 - DNA, 20 bp, Artificial
  Synthetically generated peptide
ccggcgcccggcgtggggcc

SEQ ID NO: 4201 - DNA, 20 bp, Artificial
  Synthetically generated peptide
cccggcgcccggcgtggggc

SEQ ID NO: 4202 - DNA, 20 bp, Artificial
  Synthetically generated peptide
ccccggcgcccggcgtgggg

SEQ ID NO: 4203 - DNA, 20 bp, Artificial
  Synthetically generated peptide
cccccggcgcccggcgtggg

SEQ ID NO: 4204 - DNA, 20 bp, Artificial
  Synthetically generated peptide
acccccggcgcccggcgtgg

SEQ ID NO: 4205 - DNA, 20 bp, Artificial
  Synthetically generated peptide
cacccccggcgcccggcgtg

SEQ ID NO: 4206 - DNA, 20 bp, Artificial
  Synthetically generated peptide
gcacccccggcgcccggcgt

SEQ ID NO: 4207 - DNA, 20 bp, Artificial
  Synthetically generated peptide
tgcacccccggcgcccggcg

SEQ ID NO: 4208 - DNA, 20 bp, Artificial
  Synthetically generated peptide
ctgcacccccggcgcccggc

SEQ ID NO: 4209 - DNA, 20 bp, Artificial
  Synthetically generated peptide
cctgcacccccggcgcccgg

SEQ ID NO: 4210 - DNA, 20 bp, Artificial
  Synthetically generated peptide
gcctgcacccccggcgcccg

SEQ ID NO: 4211 - DNA, 20 bp, Artificial
  Synthetically generated peptide
agcctgcacccccggcgccc

SEQ ID NO: 4212 - DNA, 20 bp, Artificial
  Synthetically generated peptide
cagcctgcacccccggcgcc

SEQ ID NO: 4213 - DNA, 20 bp, Artificial
  Synthetically generated peptide
gcagcctgcacccccggcgc

SEQ ID NO: 4214 - DNA, 20 bp, Artificial
  Synthetically generated peptide
ggcagcctgcacccccggcg

SEQ ID NO: 4215 - DNA, 20 bp, Artificial
  Synthetically generated peptide
cggcagcctgcacccccggc

SEQ ID NO: 4216 - DNA, 20 bp, Artificial
  Synthetically generated peptide
ccggcagcctgcacccccgg

SEQ ID NO: 4217 - DNA, 20 bp, Artificial
  Synthetically generated peptide
gccggcagcctgcacccccg

SEQ ID NO: 4218 - DNA, 20 bp, Artificial
  Synthetically generated peptide
ggccggcagcctgcaccccc

SEQ ID NO: 4219 - DNA, 20 bp, Artificial
  Synthetically generated peptide
gggccggcagcctgcacccc

SEQ ID NO: 4220 - DNA, 20 bp, Artificial
  Synthetically generated peptide
ggggccggcagcctgcaccc

SEQ ID NO: 4221 - DNA, 20 bp, Artificial
  Synthetically generated peptide
tggggccggcagcctgcacc

SEQ ID NO: 4222 - DNA, 20 bp, Artificial
  Synthetically generated peptide
ctggggccggcagcctgcac

SEQ ID NO: 4223 - DNA, 20 bp, Artificial
  Synthetically generated peptide
gctggggccggcagcctgca

SEQ ID NO: 4224 - DNA, 20 bp, Artificial
  Synthetically generated peptide
ggctggggccggcagcctgc

SEQ ID NO: 4225 - DNA, 20 bp, Artificial
  Synthetically generated peptide
aggctggggccggcagcctg

SEQ ID NO: 4226 - DNA, 20 bp, Artificial
  Synthetically generated peptide
gaggctggggccggcagcct

SEQ ID NO: 4227 - DNA, 20 bp, Artificial
  Synthetically generated peptide
ggaggctggggccggcagcc

SEQ ID NO: 4228 - DNA, 25 bp, Artificial
  Synthetically generated peptide
caccgggccgccgcgtccgggcgcg

SEQ ID NO: 4229 - DNA, 20 bp, Artificial
  Synthetically generated peptide
accgggccgccgcgtccggg

SEQ ID NO: 4230 - DNA, 20 bp, Artificial
  Synthetically generated peptide
ccgggccgccgcgtccgggc

SEQ ID NO: 4231 - DNA, 20 bp, Artificial
  Synthetically generated peptide
cgggccgccgcgtccgggcg

SEQ ID NO: 4232 - DNA, 20 bp, Artificial
  Synthetically generated peptide
gggccgccgcgtccgggcgc

SEQ ID NO: 4233 - DNA, 20 bp, Artificial
  Synthetically generated peptide
ggccgccgcgtccgggcgcg

SEQ ID NO: 4234 - DNA, 20 bp, Artificial
  Synthetically generated peptide
gccgccgcgtccgggcgcga

SEQ ID NO: 4235 - DNA, 20 bp, Artificial
  Synthetically generated peptide
ccgccgcgtccgggcgcgag

SEQ ID NO: 4236 - DNA, 20 bp, Artificial
  Synthetically generated peptide
cgccgcgtccgggcgcgagc

SEQ ID NO: 4237 - DNA, 20 bp, Artificial
  Synthetically generated peptide
gccgcgtccgggcgcgagcg

SEQ ID NO: 4238 - DNA, 20 bp, Artificial
  Synthetically generated peptide
ccgcgtccgggcgcgagcgc

SEQ ID NO: 4239 - DNA, 20 bp, Artificial
  Synthetically generated peptide
cgcgtccgggcgcgagcgcg

SEQ ID NO: 4240 - DNA, 20 bp, Artificial
  Synthetically generated peptide
gcgtccgggcgcgagcgcgg

SEQ ID NO: 4241 - DNA, 20 bp, Artificial
  Synthetically generated peptide
cgtccgggcgcgagcgcggg

SEQ ID NO: 4242 - DNA, 20 bp, Artificial
  Synthetically generated peptide
gtccgggcgcgagcgcgggc

SEQ ID NO: 4243 - DNA, 20 bp, Artificial
  Synthetically generated peptide
tccgggcgcgagcgcgggcc

SEQ ID NO: 4244 - DNA, 20 bp, Artificial
  Synthetically generated peptide
ccgggcgcgagcgcgggcct

SEQ ID NO: 4245 - DNA, 20 bp, Artificial
  Synthetically generated peptide
cgggcgcgagcgcgggccta

SEQ ID NO: 4246 - DNA, 20 bp, Artificial
  Synthetically generated peptide
gggcgcgagcgcgggcctag

SEQ ID NO: 4247 - DNA, 20 bp, Artificial
  Synthetically generated peptide
ggcgcgagcgcgggcctagc

SEQ ID NO: 4248 - DNA, 20 bp, Artificial
  Synthetically generated peptide
gcgcgagcgcgggcctagcc

SEQ ID NO: 4249 - DNA, 20 bp, Artificial
  Synthetically generated peptide
cgcgagcgcgggcctagccg

SEQ ID NO: 4250 - DNA, 20 bp, Artificial
  Synthetically generated peptide
gcgagcgcgggcctagccgg

SEQ ID NO: 4251 - DNA, 20 bp, Artificial
  Synthetically generated peptide
cgagcgcgggcctagccggg

SEQ ID NO: 4252 - DNA, 20 bp, Artificial
  Synthetically generated peptide
gagcgcgggcctagccgggc

SEQ ID NO: 4253 - DNA, 20 bp, Artificial
  Synthetically generated peptide
agcgcgggcctagccgggcc

SEQ ID NO: 4254 - DNA, 20 bp, Artificial
  Synthetically generated peptide
gcgcgggcctagccgggccg

SEQ ID NO: 4255 - DNA, 20 bp, Artificial
  Synthetically generated peptide
cgcgggcctagccgggccgc

SEQ ID NO: 4256 - DNA, 20 bp, Artificial
  Synthetically generated peptide
gcgggcctagccgggccgcg

SEQ ID NO: 4257 - DNA, 20 bp, Artificial
  Synthetically generated peptide
cgggcctagccgggccgcgg

SEQ ID NO: 4258 - DNA, 20 bp, Artificial
  Synthetically generated peptide
gggcctagccgggccgcggc

SEQ ID NO: 4259 - DNA, 20 bp, Artificial
  Synthetically generated peptide
ggcctagccgggccgcggcc

SEQ ID NO: 4260 - DNA, 20 bp, Artificial
  Synthetically generated peptide
gcctagccgggccgcggcct

SEQ ID NO: 4261 - DNA, 20 bp, Artificial
  Synthetically generated peptide
cctagccgggccgcggcctc

SEQ ID NO: 4262 - DNA, 20 bp, Artificial
  Synthetically generated peptide
ctagccgggccgcggcctcc

SEQ ID NO: 4263 - DNA, 20 bp, Artificial
  Synthetically generated peptide
tagccgggccgcggcctccg

SEQ ID NO: 4264 - DNA, 20 bp, Artificial
  Synthetically generated peptide
agccgggccgcggcctccgg

SEQ ID NO: 4265 - DNA, 20 bp, Artificial
  Synthetically generated peptide
gccgggccgcggcctccggc

SEQ ID NO: 4266 - DNA, 20 bp, Artificial
  Synthetically generated peptide
ccgggccgcggcctccggcg

SEQ ID NO: 4267 - DNA, 20 bp, Artificial
  Synthetically generated peptide
cgggccgcggcctccggcgc

SEQ ID NO: 4268 - DNA, 20 bp, Artificial
  Synthetically generated peptide
gggccgcggcctccggcgcc

SEQ ID NO: 4269 - DNA, 20 bp, Artificial
  Synthetically generated peptide
ggccgcggcctccggcgccc

SEQ ID NO: 4270 - DNA, 20 bp, Artificial
  Synthetically generated peptide
gccgcggcctccggcgcccg

SEQ ID NO: 4271 - DNA, 20 bp, Artificial
  Synthetically generated peptide
ccgcggcctccggcgcccgc

SEQ ID NO: 4272 - DNA, 20 bp, Artificial
  Synthetically generated peptide
cgcggcctccggcgcccgcc

SEQ ID NO: 4273 - DNA, 20 bp, Artificial
  Synthetically generated peptide
gcggcctccggcgcccgccg

SEQ ID NO: 4274 - DNA, 20 bp, Artificial
  Synthetically generated peptide
cggcctccggcgcccgccgc

SEQ ID NO: 4275 - DNA, 20 bp, Artificial
  Synthetically generated peptide
ggcctccggcgcccgccgct

SEQ ID NO: 4276 - DNA, 20 bp, Artificial
  Synthetically generated peptide
gcctccggcgcccgccgctc

SEQ ID NO: 4277 - DNA, 20 bp, Artificial
  Synthetically generated peptide
cctccggcgcccgccgctcc

SEQ ID NO: 4278 - DNA, 20 bp, Artificial
  Synthetically generated peptide
ctccggcgcccgccgctccg

SEQ ID NO: 4279 - DNA, 20 bp, Artificial
  Synthetically generated peptide
tccggcgcccgccgctccgc

SEQ ID NO: 4280 - DNA, 20 bp, Artificial
  Synthetically generated peptide
ccggcgcccgccgctccgca

SEQ ID NO: 4281 - DNA, 20 bp, Artificial
  Synthetically generated peptide
cggcgcccgccgctccgcat

SEQ ID NO: 4282 - DNA, 20 bp, Artificial
  Synthetically generated peptide
ggcgcccgccgctccgcatc

SEQ ID NO: 4283 - DNA, 20 bp, Artificial
  Synthetically generated peptide
gcgcccgccgctccgcatcc

SEQ ID NO: 4284 - DNA, 20 bp, Artificial
  Synthetically generated peptide
cgcccgccgctccgcatccc

SEQ ID NO: 4285 - DNA, 20 bp, Artificial
  Synthetically generated peptide
gcccgccgctccgcatcccc

SEQ ID NO: 4286 - DNA, 20 bp, Artificial
  Synthetically generated peptide
cccgccgctccgcatccccg

SEQ ID NO: 4287 - DNA, 20 bp, Artificial
  Synthetically generated peptide
ccgccgctccgcatccccgc

SEQ ID NO: 4288 - DNA, 20 bp, Artificial
  Synthetically generated peptide
cgccgctccgcatccccgcg

SEQ ID NO: 4289 - DNA, 20 bp, Artificial
  Synthetically generated peptide
gccgctccgcatccccgcgg

SEQ ID NO: 4290 - DNA, 20 bp, Artificial
  Synthetically generated peptide
ccgctccgcatccccgcggg

SEQ ID NO: 4291 - DNA, 20 bp, Artificial
  Synthetically generated peptide
cgctccgcatccccgcgggc

SEQ ID NO: 4292 - DNA, 20 bp, Artificial
  Synthetically generated peptide
gctccgcatccccgcgggcc

SEQ ID NO: 4293 - DNA, 20 bp, Artificial
  Synthetically generated peptide
ctccgcatccccgcgggccg

SEQ ID NO: 4294 - DNA, 20 bp, Artificial
  Synthetically generated peptide
tccgcatccccgcgggccgg

SEQ ID NO: 4295 - DNA, 20 bp, Artificial
  Synthetically generated peptide
ccgcatccccgcgggccggc

SEQ ID NO: 4296 - DNA, 20 bp, Artificial
  Synthetically generated peptide
cgcatccccgcgggccggcg

SEQ ID NO: 4297 - DNA, 20 bp, Artificial
  Synthetically generated peptide
gcatccccgcgggccggcgc

SEQ ID NO: 4298 - DNA, 20 bp, Artificial
  Synthetically generated peptide
catccccgcgggccggcgct

SEQ ID NO: 4299 - DNA, 20 bp, Artificial
  Synthetically generated peptide
atccccgcgggccggcgctg

SEQ ID NO: 4300 - DNA, 20 bp, Artificial
  Synthetically generated peptide
tccccgcgggccggcgctgg

SEQ ID NO: 4301 - DNA, 20 bp, Artificial
  Synthetically generated peptide
ccccgcgggccggcgctggg

SEQ ID NO: 4302 - DNA, 20 bp, Artificial
  Synthetically generated peptide
cccgcgggccggcgctgggc

SEQ ID NO: 4303 - DNA, 20 bp, Artificial
  Synthetically generated peptide
ccgcgggccggcgctgggcg

SEQ ID NO: 4304 - DNA, 20 bp, Artificial
  Synthetically generated peptide
cgcgggccggcgctgggcgg

SEQ ID NO: 4305 - DNA, 20 bp, Artificial
  Synthetically generated peptide
gcgggccggcgctgggcggg

SEQ ID NO: 4306 - DNA, 20 bp, Artificial
  Synthetically generated peptide
cgggccggcgctgggcgggg

SEQ ID NO: 4307 - DNA, 20 bp, Artificial
  Synthetically generated peptide
gggccggcgctgggcggggc

SEQ ID NO: 4308 - DNA, 20 bp, Artificial
  Synthetically generated peptide
ggccggcgctgggcggggcc

SEQ ID NO: 4309 - DNA, 20 bp, Artificial
  Synthetically generated peptide
gccggcgctgggcggggccg

SEQ ID NO: 4310 - DNA, 20 bp, Artificial
  Synthetically generated peptide
ccggcgctgggcggggccgg

SEQ ID NO: 4311 - DNA, 20 bp, Artificial
  Synthetically generated peptide
cggcgctgggcggggccggg

SEQ ID NO: 4312 - DNA, 20 bp, Artificial
  Synthetically generated peptide
ggcgctgggcggggccgggc

SEQ ID NO: 4313 - DNA, 20 bp, Artificial
  Synthetically generated peptide
gcgctgggcggggccgggct

SEQ ID NO: 4314 - DNA, 20 bp, Artificial
  Synthetically generated peptide
cgctgggcggggccgggctg

SEQ ID NO: 4315 - DNA, 20 bp, Artificial
  Synthetically generated peptide
gctgggcggggccgggctgg

SEQ ID NO: 4316 - DNA, 20 bp, Artificial
  Synthetically generated peptide
ctgggcggggccgggctgga

SEQ ID NO: 4317 - DNA, 20 bp, Artificial
  Synthetically generated peptide
tcaccgggccgccgcgtccg

SEQ ID NO: 4318 - DNA, 20 bp, Artificial
  Synthetically generated peptide
ctcaccgggccgccgcgtcc

SEQ ID NO: 4319 - DNA, 20 bp, Artificial
  Synthetically generated peptide
actcaccgggccgccgcgtc

SEQ ID NO: 4320 - DNA, 20 bp, Artificial
  Synthetically generated peptide
gactcaccgggccgccgcgt

SEQ ID NO: 4321 - DNA, 20 bp, Artificial
  Synthetically generated peptide
ggactcaccgggccgccgcg

SEQ ID NO: 4322 - DNA, 20 bp, Artificial
  Synthetically generated peptide
gggactcaccgggccgccgc

SEQ ID NO: 4323 - DNA, 20 bp, Artificial
  Synthetically generated peptide
ggggactcaccgggccgccg

SEQ ID NO: 4324 - DNA, 20 bp, Artificial
  Synthetically generated peptide
cggggactcaccgggccgcc

SEQ ID NO: 4325 - DNA, 20 bp, Artificial
  Synthetically generated peptide
gcggggactcaccgggccgc

SEQ ID NO: 4326 - DNA, 20 bp, Artificial
  Synthetically generated peptide
ggcggggactcaccgggccg

SEQ ID NO: 4327 - DNA, 20 bp, Artificial
  Synthetically generated peptide
gggcggggactcaccgggcc

SEQ ID NO: 4328 - DNA, 20 bp, Artificial
  Synthetically generated peptide
cgggcggggactcaccgggc

SEQ ID NO: 4329 - DNA, 20 bp, Artificial
  Synthetically generated peptide
gcgggcggggactcaccggg

SEQ ID NO: 4330 - DNA, 20 bp, Artificial
  Synthetically generated peptide
ggcgggcggggactcaccgg

SEQ ID NO: 4331 - DNA, 20 bp, Artificial
  Synthetically generated peptide
cggcgggcggggactcaccg

SEQ ID NO: 4332 - DNA, 20 bp, Artificial
  Synthetically generated peptide
acggcgggcggggactcacc

SEQ ID NO: 4333 - DNA, 20 bp, Artificial
  Synthetically generated peptide
cacggcgggcggggactcac

SEQ ID NO: 4334 - DNA, 20 bp, Artificial
  Synthetically generated peptide
ccacggcgggcggggactca

SEQ ID NO: 4335 - DNA, 20 bp, Artificial
  Synthetically generated peptide
gccacggcgggcggggactc

SEQ ID NO: 4336 - DNA, 20 bp, Artificial
  Synthetically generated peptide
ggccacggcgggcggggact

SEQ ID NO: 4337 - DNA, 20 bp, Artificial
  Synthetically generated peptide
cggccacggcgggcggggac

SEQ ID NO: 4338 - DNA, 22 bp, Artificial
  Synthetically generated peptide
cacatccgcctccgccgcccgg

SEQ ID NO: 4339 - DNA, 22 bp, Artificial
  Synthetically generated peptide
gcgcgagccctactggcagtcg

SEQ ID NO: 4340 - DNA, 20 bp, Artificial
  Synthetically generated peptide
cgcgagccctactggcagtc

SEQ ID NO: 4341 - DNA, 20 bp, Artificial
  Synthetically generated peptide
gcgagccctactggcagtcg

SEQ ID NO: 4342 - DNA, 20 bp, Artificial
  Synthetically generated peptide
cgagccctactggcagtcga

SEQ ID NO: 4343 - DNA, 20 bp, Artificial
  Synthetically generated peptide
gagccctactggcagtcgac

SEQ ID NO: 4344 - DNA, 20 bp, Artificial
  Synthetically generated peptide
agccctactggcagtcgact

SEQ ID NO: 4345 - DNA, 20 bp, Artificial
  Synthetically generated peptide
gccctactggcagtcgactt

SEQ ID NO: 4346 - DNA, 20 bp, Artificial
  Synthetically generated peptide
ccctactggcagtcgacttc

SEQ ID NO: 4347 - DNA, 20 bp, Artificial
  Synthetically generated peptide
cctactggcagtcgacttct

SEQ ID NO: 4348 - DNA, 20 bp, Artificial
  Synthetically generated peptide
ctactggcagtcgacttcta

SEQ ID NO: 4349 - DNA, 20 bp, Artificial
  Synthetically generated peptide
tactggcagtcgacttctaa

SEQ ID NO: 4350 - DNA, 20 bp, Artificial
  Synthetically generated peptide
actggcagtcgacttctaac

SEQ ID NO: 4351 - DNA, 20 bp, Artificial
  Synthetically generated peptide
ctggcagtcgacttctaact

SEQ ID NO: 4352 - DNA, 20 bp, Artificial
  Synthetically generated peptide
tggcagtcgacttctaactt

SEQ ID NO: 4353 - DNA, 20 bp, Artificial
  Synthetically generated peptide
ggcagtcgacttctaacttg

SEQ ID NO: 4354 - DNA, 20 bp, Artificial
  Synthetically generated peptide
gcagtcgacttctaacttgg

SEQ ID NO: 4355 - DNA, 20 bp, Artificial
  Synthetically generated peptide
cagtcgacttctaacttggc

SEQ ID NO: 4356 - DNA, 20 bp, Artificial
  Synthetically generated peptide
agtcgacttctaacttggct

SEQ ID NO: 4357 - DNA, 20 bp, Artificial
  Synthetically generated peptide
gtcgacttctaacttggctc

SEQ ID NO: 4358 - DNA, 20 bp, Artificial
  Synthetically generated peptide
tcgacttctaacttggctcg

SEQ ID NO: 4359 - DNA, 20 bp, Artificial
  Synthetically generated peptide
cgacttctaacttggctcgg

SEQ ID NO: 4360 - DNA, 20 bp, Artificial
  Synthetically generated peptide
gacttctaacttggctcggg

SEQ ID NO: 4361 - DNA, 20 bp, Artificial
  Synthetically generated peptide
acttctaacttggctcgggc

SEQ ID NO: 4362 - DNA, 20 bp, Artificial
  Synthetically generated peptide
cttctaacttggctcgggca

SEQ ID NO: 4363 - DNA, 20 bp, Artificial
  Synthetically generated peptide
ttctaacttggctcgggcat

SEQ ID NO: 4364 - DNA, 20 bp, Artificial
  Synthetically generated peptide
tctaacttggctcgggcatc

SEQ ID NO: 4365 - DNA, 20 bp, Artificial
  Synthetically generated peptide
ctaacttggctcgggcatcc

SEQ ID NO: 4366 - DNA, 20 bp, Artificial
  Synthetically generated peptide
taacttggctcgggcatcca

SEQ ID NO: 4367 - DNA, 20 bp, Artificial
  Synthetically generated peptide
aacttggctcgggcatccat

SEQ ID NO: 4368 - DNA, 20 bp, Artificial
  Synthetically generated peptide
acttggctcgggcatccatc

SEQ ID NO: 4369 - DNA, 20 bp, Artificial
  Synthetically generated peptide
cttggctcgggcatccatcg

SEQ ID NO: 4370 - DNA, 20 bp, Artificial
  Synthetically generated peptide
ttggctcgggcatccatcgc

SEQ ID NO: 4371 - DNA, 20 bp, Artificial
  Synthetically generated peptide
tggctcgggcatccatcgct

SEQ ID NO: 4372 - DNA, 20 bp, Artificial
  Synthetically generated peptide
ggctcgggcatccatcgctc

SEQ ID NO: 4373 - DNA, 20 bp, Artificial
  Synthetically generated peptide
gctcgggcatccatcgctct

SEQ ID NO: 4374 - DNA, 20 bp, Artificial
  Synthetically generated peptide
ctcgggcatccatcgctctg

SEQ ID NO: 4375 - DNA, 20 bp, Artificial
  Synthetically generated peptide
tcgggcatccatcgctctgg

SEQ ID NO: 4376 - DNA, 20 bp, Artificial
  Synthetically generated peptide
cgggcatccatcgctctggc

SEQ ID NO: 4377 - DNA, 20 bp, Artificial
  Synthetically generated peptide
gggcatccatcgctctggcc

SEQ ID NO: 4378 - DNA, 20 bp, Artificial
  Synthetically generated peptide
ggcatccatcgctctggcct

SEQ ID NO: 4379 - DNA, 20 bp, Artificial
  Synthetically generated peptide
gcatccatcgctctggcctg

SEQ ID NO: 4380 - DNA, 20 bp, Artificial
  Synthetically generated peptide
catccatcgctctggcctga

SEQ ID NO: 4381 - DNA, 20 bp, Artificial
  Synthetically generated peptide
atccatcgctctggcctgaa

SEQ ID NO: 4382 - DNA, 20 bp, Artificial
  Synthetically generated peptide
tccatcgctctggcctgaac

SEQ ID NO: 4383 - DNA, 20 bp, Artificial
  Synthetically generated peptide
ccatcgctctggcctgaact

SEQ ID NO: 4384 - DNA, 20 bp, Artificial
  Synthetically generated peptide
catcgctctggcctgaactc

SEQ ID NO: 4385 - DNA, 20 bp, Artificial
  Synthetically generated peptide
atcgctctggcctgaactca

SEQ ID NO: 4386 - DNA, 20 bp, Artificial
  Synthetically generated peptide
tcgctctggcctgaactcag

SEQ ID NO: 4387 - DNA, 20 bp, Artificial
  Synthetically generated peptide
cgctctggcctgaactcagg

SEQ ID NO: 4388 - DNA, 20 bp, Artificial
  Synthetically generated peptide
tgcgcgagccctactggcag

SEQ ID NO: 4389 - DNA, 20 bp, Artificial
  Synthetically generated peptide
ctgcgcgagccctactggca

SEQ ID NO: 4390 - DNA, 20 bp, Artificial
  Synthetically generated peptide
tctgcgcgagccctactggc

SEQ ID NO: 4391 - DNA, 20 bp, Artificial
  Synthetically generated peptide
ttctgcgcgagccctactgg

SEQ ID NO: 4392 - DNA, 20 bp, Artificial
  Synthetically generated peptide
attctgcgcgagccctactg

SEQ ID NO: 4393 - DNA, 20 bp, Artificial
  Synthetically generated peptide
gattctgcgcgagccctact

SEQ ID NO: 4394 - DNA, 20 bp, Artificial
  Synthetically generated peptide
cgattctgcgcgagccctac

SEQ ID NO: 4395 - DNA, 20 bp, Artificial
  Synthetically generated peptide
ccgattctgcgcgagcccta

SEQ ID NO: 4396 - DNA, 20 bp, Artificial
  Synthetically generated peptide
tccgattctgcgcgagccct

SEQ ID NO: 4397 - DNA, 20 bp, Artificial
  Synthetically generated peptide
ctccgattctgcgcgagccc

SEQ ID NO: 4398 - DNA, 20 bp, Artificial
  Synthetically generated peptide
tctccgattctgcgcgagcc

SEQ ID NO: 4399 - DNA, 20 bp, Artificial
  Synthetically generated peptide
ctctccgattctgcgcgagc

SEQ ID NO: 4400 - DNA, 20 bp, Artificial
  Synthetically generated peptide
gctctccgattctgcgcgag

SEQ ID NO: 4401 - DNA, 20 bp, Artificial
  Synthetically generated peptide
ggctctccgattctgcgcga

SEQ ID NO: 4402 - DNA, 20 bp, Artificial
  Synthetically generated peptide
cggctctccgattctgcgcg

SEQ ID NO: 4403 - DNA, 20 bp, Artificial
  Synthetically generated peptide
ccggctctccgattctgcgc

SEQ ID NO: 4404 - DNA, 20 bp, Artificial
  Synthetically generated peptide
accggctctccgattctgcg

SEQ ID NO: 4405 - DNA, 20 bp, Artificial
  Synthetically generated peptide
caccggctctccgattctgc

SEQ ID NO: 4406 - DNA, 20 bp, Artificial
  Synthetically generated peptide
ccaccggctctccgattctg

SEQ ID NO: 4407 - DNA, 20 bp, Artificial
  Synthetically generated peptide
gccaccggctctccgattct

SEQ ID NO: 4408 - DNA, 20 bp, Artificial
  Synthetically generated peptide
cgccaccggctctccgattc

SEQ ID NO: 4409 - DNA, 20 bp, Artificial
  Synthetically generated peptide
acgccaccggctctccgatt

SEQ ID NO: 4410 - DNA, 20 bp, Artificial
  Synthetically generated peptide
gacgccaccggctctccgat

SEQ ID NO: 4411 - DNA, 20 bp, Artificial
  Synthetically generated peptide
cgacgccaccggctctccga

SEQ ID NO: 4412 - DNA, 20 bp, Artificial
  Synthetically generated peptide
gcgacgccaccggctctccg

SEQ ID NO: 4413 - DNA, 20 bp, Artificial
  Synthetically generated peptide
tgcgacgccaccggctctcc

SEQ ID NO: 4414 - DNA, 20 bp, Artificial
  Synthetically generated peptide
ctgcgacgccaccggctctc

SEQ ID NO: 4415 - DNA, 20 bp, Artificial
  Synthetically generated peptide
cctgcgacgccaccggctct

SEQ ID NO: 4416 - DNA, 20 bp, Artificial
  Synthetically generated peptide
acctgcgacgccaccggctc

SEQ ID NO: 4417 - DNA, 20 bp, Artificial
  Synthetically generated peptide
gacctgcgacgccaccggct

SEQ ID NO: 4418 - DNA, 20 bp, Artificial
  Synthetically generated peptide
cgacctgcgacgccaccggc

SEQ ID NO: 4419 - DNA, 20 bp, Artificial
  Synthetically generated peptide
ccgacctgcgacgccaccgg

SEQ ID NO: 4420 - DNA, 20 bp, Artificial
  Synthetically generated peptide
cccgacctgcgacgccaccg

SEQ ID NO: 4421 - DNA, 20 bp, Artificial
  Synthetically generated peptide
tcccgacctgcgacgccacc

SEQ ID NO: 4422 - DNA, 20 bp, Artificial
  Synthetically generated peptide
ctcccgacctgcgacgccac

SEQ ID NO: 4423 - DNA, 20 bp, Artificial
  Synthetically generated peptide
cctcccgacctgcgacgcca

SEQ ID NO: 4424 - DNA, 20 bp, Artificial
  Synthetically generated peptide
tcctcccgacctgcgacgcc

SEQ ID NO: 4425 - DNA, 20 bp, Artificial
  Synthetically generated peptide
gtcctcccgacctgcgacgc

SEQ ID NO: 4426 - DNA, 20 bp, Artificial
  Synthetically generated peptide
cgtcctcccgacctgcgacg

SEQ ID NO: 4427 - DNA, 20 bp, Artificial
  Synthetically generated peptide
tcgtcctcccgacctgcgac

SEQ ID NO: 4428 - DNA, 20 bp, Artificial
  Synthetically generated peptide
ctcgtcctcccgacctgcga

SEQ ID NO: 4429 - DNA, 20 bp, Artificial
  Synthetically generated peptide
gctcgtcctcccgacctgcg

SEQ ID NO: 4430 - DNA, 20 bp, Artificial
  Synthetically generated peptide
tgctcgtcctcccgacctgc

SEQ ID NO: 4431 - DNA, 20 bp, Artificial
  Synthetically generated peptide
gtgctcgtcctcccgacctg

SEQ ID NO: 4432 - DNA, 20 bp, Artificial
  Synthetically generated peptide
ggtgctcgtcctcccgacct

SEQ ID NO: 4433 - DNA, 20 bp, Artificial
  Synthetically generated peptide
cggtgctcgtcctcccgacc

SEQ ID NO: 4434 - DNA, 20 bp, Artificial
  Synthetically generated peptide
tcggtgctcgtcctcccgac

SEQ ID NO: 4435 - DNA, 20 bp, Artificial
  Synthetically generated peptide
ctcggtgctcgtcctcccga

SEQ ID NO: 4436 - DNA, 20 bp, Artificial
  Synthetically generated peptide
actcggtgctcgtcctcccg

SEQ ID NO: 4437 - DNA, 20 bp, Artificial
  Synthetically generated peptide
gactcggtgctcgtcctccc

SEQ ID NO: 4438 - DNA, 20 bp, Artificial
  Synthetically generated peptide
cgactcggtgctcgtcctcc

SEQ ID NO: 4439 - DNA, 20 bp, Artificial
  Synthetically generated peptide
tcgactcggtgctcgtcctc

SEQ ID NO: 4440 - DNA, 20 bp, Artificial
  Synthetically generated peptide
ctcgactcggtgctcgtcct

SEQ ID NO: 4441 - DNA, 20 bp, Artificial
  Synthetically generated peptide
cctcgactcggtgctcgtcc

SEQ ID NO: 4442 - DNA, 20 bp, Artificial
  Synthetically generated peptide
ccctcgactcggtgctcgtc

SEQ ID NO: 4443 - DNA, 20 bp, Artificial
  Synthetically generated peptide
gccctcgactcggtgctcgt

SEQ ID NO: 4444 - DNA, 20 bp, Artificial
  Synthetically generated peptide
agccctcgactcggtgctcg

SEQ ID NO: 4445 - DNA, 20 bp, Artificial
  Synthetically generated peptide
gagccctcgactcggtgctc

SEQ ID NO: 4446 - DNA, 20 bp, Artificial
  Synthetically generated peptide
cgagccctcgactcggtgct

SEQ ID NO: 4447 - DNA, 20 bp, Artificial
  Synthetically generated peptide
gcgagccctcgactcggtgc

SEQ ID NO: 4448 - DNA, 20 bp, Artificial
  Synthetically generated peptide
agcgagccctcgactcggtg

SEQ ID NO: 4449 - DNA, 20 bp, Artificial
  Synthetically generated peptide
gagcgagccctcgactcggt

SEQ ID NO: 4450 - DNA, 20 bp, Artificial
  Synthetically generated peptide
cgagcgagccctcgactcgg

SEQ ID NO: 4451 - DNA, 20 bp, Artificial
  Synthetically generated peptide
acgagcgagccctcgactcg

SEQ ID NO: 4452 - DNA, 20 bp, Artificial
  Synthetically generated peptide
gacgagcgagccctcgactc

SEQ ID NO: 4453 - DNA, 20 bp, Artificial
  Synthetically generated peptide
agacgagcgagccctcgact

SEQ ID NO: 4454 - DNA, 20 bp, Artificial
  Synthetically generated peptide
cagacgagcgagccctcgac

SEQ ID NO: 4455 - DNA, 20 bp, Artificial
  Synthetically generated peptide
ccagacgagcgagccctcga

SEQ ID NO: 4456 - DNA, 20 bp, Artificial
  Synthetically generated peptide
cccagacgagcgagccctcg

SEQ ID NO: 4457 - DNA, 20 bp, Artificial
  Synthetically generated peptide
gcccagacgagcgagccctc

SEQ ID NO: 4458 - DNA, 20 bp, Artificial
  Synthetically generated peptide
ggcccagacgagcgagccct

SEQ ID NO: 4459 - DNA, 20 bp, Artificial
  Synthetically generated peptide
cggcccagacgagcgagccc

SEQ ID NO: 4460 - DNA, 20 bp, Artificial
  Synthetically generated peptide
gcggcccagacgagcgagcc

SEQ ID NO: 4461 - DNA, 20 bp, Artificial
  Synthetically generated peptide
ggcggcccagacgagcgagc

SEQ ID NO: 4462 - DNA, 29 bp, Artificial
  Synthetically generated peptide
cggggcgtggcctagcgatctggtggccg

SEQ ID NO: 4463 - DNA, 20 bp, Artificial
  Synthetically generated peptide
ggggcgtggcctagcgatct

SEQ ID NO: 4464 - DNA, 20 bp, Artificial
  Synthetically generated peptide
gggcgtggcctagcgatctg

SEQ ID NO: 4465 - DNA, 20 bp, Artificial
  Synthetically generated peptide
ggcgtggcctagcgatctgg

SEQ ID NO: 4466 - DNA, 20 bp, Artificial
  Synthetically generated peptide
gcgtggcctagcgatctggt

SEQ ID NO: 4467 - DNA, 20 bp, Artificial
  Synthetically generated peptide
cgtggcctagcgatctggtg

SEQ ID NO: 4468 - DNA, 20 bp, Artificial
  Synthetically generated peptide
gtggcctagcgatctggtgg

SEQ ID NO: 4469 - DNA, 20 bp, Artificial
  Synthetically generated peptide
tggcctagcgatctggtggc

SEQ ID NO: 4470 - DNA, 20 bp, Artificial
  Synthetically generated peptide
ggcctagcgatctggtggcc

SEQ ID NO: 4471 - DNA, 20 bp, Artificial
  Synthetically generated peptide
gcctagcgatctggtggccg

SEQ ID NO: 4472 - DNA, 20 bp, Artificial
  Synthetically generated peptide
cctagcgatctggtggccgc

SEQ ID NO: 4473 - DNA, 20 bp, Artificial
  Synthetically generated peptide
ctagcgatctggtggccgcc

SEQ ID NO: 4474 - DNA, 20 bp, Artificial
  Synthetically generated peptide
tagcgatctggtggccgcca

SEQ ID NO: 4475 - DNA, 20 bp, Artificial
  Synthetically generated peptide
agcgatctggtggccgccat

SEQ ID NO: 4476 - DNA, 20 bp, Artificial
  Synthetically generated peptide
gcgatctggtggccgccatt

SEQ ID NO: 4477 - DNA, 20 bp, Artificial
  Synthetically generated peptide
cgatctggtggccgccattt

SEQ ID NO: 4478 - DNA, 20 bp, Artificial
  Synthetically generated peptide
gatctggtggccgccatttc

SEQ ID NO: 4479 - DNA, 20 bp, Artificial
  Synthetically generated peptide
atctggtggccgccatttcg

SEQ ID NO: 4480 - DNA, 20 bp, Artificial
  Synthetically generated peptide
tctggtggccgccatttcga

SEQ ID NO: 4481 - DNA, 20 bp, Artificial
  Synthetically generated peptide
ctggtggccgccatttcgaa

SEQ ID NO: 4482 - DNA, 20 bp, Artificial
  Synthetically generated peptide
tggtggccgccatttcgaag

SEQ ID NO: 4483 - DNA, 20 bp, Artificial
  Synthetically generated peptide
ggtggccgccatttcgaagc

SEQ ID NO: 4484 - DNA, 20 bp, Artificial
  Synthetically generated peptide
gtggccgccatttcgaagct

SEQ ID NO: 4485 - DNA, 20 bp, Artificial
  Synthetically generated peptide
tggccgccatttcgaagctg

SEQ ID NO: 4486 - DNA, 20 bp, Artificial
  Synthetically generated peptide
ggccgccatttcgaagctga

SEQ ID NO: 4487 - DNA, 20 bp, Artificial
  Synthetically generated peptide
gccgccatttcgaagctgaa

SEQ ID NO: 4488 - DNA, 20 bp, Artificial
  Synthetically generated peptide
ccgccatttcgaagctgaag

SEQ ID NO: 4489 - DNA, 20 bp, Artificial
  Synthetically generated peptide
cgccatttcgaagctgaaga

SEQ ID NO: 4490 - DNA, 20 bp, Artificial
  Synthetically generated peptide
gccatttcgaagctgaagag

SEQ ID NO: 4491 - DNA, 20 bp, Artificial
  Synthetically generated peptide
ccatttcgaagctgaagagg

SEQ ID NO: 4492 - DNA, 20 bp, Artificial
  Synthetically generated peptide
catttcgaagctgaagaggt

SEQ ID NO: 4493 - DNA, 20 bp, Artificial
  Synthetically generated peptide
ccggggcgtggcctagcgat

SEQ ID NO: 4494 - DNA, 20 bp, Artificial
  Synthetically generated peptide
cccggggcgtggcctagcga

SEQ ID NO: 4495 - DNA, 20 bp, Artificial
  Synthetically generated peptide
ccccggggcgtggcctagcg

SEQ ID NO: 4496 - DNA, 20 bp, Artificial
  Synthetically generated peptide
cccccggggcgtggcctagc

SEQ ID NO: 4497 - DNA, 20 bp, Artificial
  Synthetically generated peptide
gcccccggggcgtggcctag

SEQ ID NO: 4498 - DNA, 20 bp, Artificial
  Synthetically generated peptide
cgcccccggggcgtggccta

SEQ ID NO: 4499 - DNA, 20 bp, Artificial
  Synthetically generated peptide
ccgcccccggggcgtggcct

SEQ ID NO: 4500 - DNA, 20 bp, Artificial
  Synthetically generated peptide
cccgcccccggggcgtggcc

SEQ ID NO: 4501 - DNA, 20 bp, Artificial
  Synthetically generated peptide
ccccgcccccggggcgtggc

SEQ ID NO: 4502 - DNA, 20 bp, Artificial
  Synthetically generated peptide
gccccgcccccggggcgtgg

SEQ ID NO: 4503 - DNA, 20 bp, Artificial
  Synthetically generated peptide
ggccccgcccccggggcgtg

SEQ ID NO: 4504 - DNA, 20 bp, Artificial
  Synthetically generated peptide
aggccccgcccccggggcgt

SEQ ID NO: 4505 - DNA, 20 bp, Artificial
  Synthetically generated peptide
caggccccgcccccggggcg

SEQ ID NO: 4506 - DNA, 20 bp, Artificial
  Synthetically generated peptide
tcaggccccgcccccggggc

SEQ ID NO: 4507 - DNA, 20 bp, Artificial
  Synthetically generated peptide
ctcaggccccgcccccgggg

SEQ ID NO: 4508 - DNA, 20 bp, Artificial
  Synthetically generated peptide
actcaggccccgcccccggg

SEQ ID NO: 4509 - DNA, 20 bp, Artificial
  Synthetically generated peptide
aactcaggccccgcccccgg

SEQ ID NO: 4510 - DNA, 20 bp, Artificial
  Synthetically generated peptide
gaactcaggccccgcccccg

SEQ ID NO: 4511 - DNA, 20 bp, Artificial
  Synthetically generated peptide
tgaactcaggccccgccccc

SEQ ID NO: 4512 - DNA, 20 bp, Artificial
  Synthetically generated peptide
ctgaactcaggccccgcccc

SEQ ID NO: 4513 - DNA, 20 bp, Artificial
  Synthetically generated peptide
cctgaactcaggccccgccc

SEQ ID NO: 4514 - DNA, 20 bp, Artificial
  Synthetically generated peptide
gcctgaactcaggccccgcc

SEQ ID NO: 4515 - DNA, 20 bp, Artificial
  Synthetically generated peptide
ggcctgaactcaggccccgc

SEQ ID NO: 4516 - DNA, 20 bp, Artificial
  Synthetically generated peptide
tggcctgaactcaggccccg

SEQ ID NO: 4517 - DNA, 27 bp, Artificial
  Synthetically generated peptide
tttcgaagctgaagaggttaggcgacg

SEQ ID NO: 4518 - DNA, 20 bp, Artificial
  Synthetically generated peptide
ttcgaagctgaagaggttag

SEQ ID NO: 4519 - DNA, 23 bp, Artificial
  Synthetically generated peptide
cgacgctgacttgctttcaggag

SEQ ID NO: 4520 - DNA, 20 bp, Artificial
  Synthetically generated peptide
gacgctgacttgctttcagg

SEQ ID NO: 4521 - DNA, 20 bp, Artificial
  Synthetically generated peptide
acgctgacttgctttcagga

SEQ ID NO: 4522 - DNA, 20 bp, Artificial
  Synthetically generated peptide
cgctgacttgctttcaggag

SEQ ID NO: 4523 - DNA, 20 bp, Artificial
  Synthetically generated peptide
gcgacgctgacttgctttca

SEQ ID NO: 4524 - DNA, 20 bp, Artificial
  Synthetically generated peptide
ggcgacgctgacttgctttc

SEQ ID NO: 4525 - DNA, 20 bp, Artificial
  Synthetically generated peptide
aggcgacgctgacttgcttt

SEQ ID NO: 4526 - DNA, 20 bp, Artificial
  Synthetically generated peptide
taggcgacgctgacttgctt

SEQ ID NO: 4527 - DNA, 20 bp, Artificial
  Synthetically generated peptide
ttaggcgacgctgacttgct

SEQ ID NO: 4528 - DNA, 20 bp, Artificial
  Synthetically generated peptide
gttaggcgacgctgacttgc

SEQ ID NO: 4529 - DNA, 20 bp, Artificial
  Synthetically generated peptide
ggttaggcgacgctgacttg

SEQ ID NO: 4530 - DNA, 20 bp, Artificial
  Synthetically generated peptide
aggttaggcgacgctgactt

SEQ ID NO: 4531 - DNA, 20 bp, Artificial
  Synthetically generated peptide
gaggttaggcgacgctgact

SEQ ID NO: 4532 - DNA, 20 bp, Artificial
  Synthetically generated peptide
agaggttaggcgacgctgac

SEQ ID NO: 4533 - DNA, 23 bp, Artificial
  Synthetically generated peptide
aatcgagaagaaccggctttcgg

SEQ ID NO: 4534 - DNA, 20 bp, Artificial
  Synthetically generated peptide
atcgagaagaaccggctttc

SEQ ID NO: 4535 - DNA, 20 bp, Artificial
  Synthetically generated peptide
tcgagaagaaccggctttcg

SEQ ID NO: 4536 - DNA, 20 bp, Artificial
  Synthetically generated peptide
cgagaagaaccggctttcgg

SEQ ID NO: 4537 - DNA, 20 bp, Artificial
  Synthetically generated peptide
gagaagaaccggctttcggc

SEQ ID NO: 4538 - DNA, 20 bp, Artificial
  Synthetically generated peptide
agaagaaccggctttcggcc

SEQ ID NO: 4539 - DNA, 20 bp, Artificial
  Synthetically generated peptide
gaagaaccggctttcggcca

SEQ ID NO: 4540 - DNA, 20 bp, Artificial
  Synthetically generated peptide
aagaaccggctttcggccag

SEQ ID NO: 4541 - DNA, 20 bp, Artificial
  Synthetically generated peptide
agaaccggctttcggccagc

SEQ ID NO: 4542 - DNA, 20 bp, Artificial
  Synthetically generated peptide
gaaccggctttcggccagcc

SEQ ID NO: 4543 - DNA, 20 bp, Artificial
  Synthetically generated peptide
aaccggctttcggccagcca

SEQ ID NO: 4544 - DNA, 20 bp, Artificial
  Synthetically generated peptide
accggctttcggccagccag

SEQ ID NO: 4545 - DNA, 20 bp, Artificial
  Synthetically generated peptide
ccggctttcggccagccagg

SEQ ID NO: 4546 - DNA, 20 bp, Artificial
  Synthetically generated peptide
cggctttcggccagccagga

SEQ ID NO: 4547 - DNA, 20 bp, Artificial
  Synthetically generated peptide
ggctttcggccagccaggag

SEQ ID NO: 4548 - DNA, 20 bp, Artificial
  Synthetically generated peptide
gctttcggccagccaggagt

SEQ ID NO: 4549 - DNA, 20 bp, Artificial
  Synthetically generated peptide
ctttcggccagccaggagtg

SEQ ID NO: 4550 - DNA, 20 bp, Artificial
  Synthetically generated peptide
tttcggccagccaggagtgg

SEQ ID NO: 4551 - DNA, 20 bp, Artificial
  Synthetically generated peptide
ttcggccagccaggagtggc

SEQ ID NO: 4552 - DNA, 20 bp, Artificial
  Synthetically generated peptide
tcggccagccaggagtggcc

SEQ ID NO: 4553 - DNA, 20 bp, Artificial
  Synthetically generated peptide
cggccagccaggagtggcca

SEQ ID NO: 4554 - DNA, 20 bp, Artificial
  Synthetically generated peptide
taatcgagaagaaccggctt

SEQ ID NO: 4555 - DNA, 20 bp, Artificial
  Synthetically generated peptide
gtaatcgagaagaaccggct

SEQ ID NO: 4556 - DNA, 22 bp, Artificial
  Synthetically generated peptide
ctttgacgcgtcctctccgggc

SEQ ID NO: 4557 - DNA, 20 bp, Artificial
  Synthetically generated peptide
tttgacgcgtcctctccggg

SEQ ID NO: 4558 - DNA, 20 bp, Artificial
  Synthetically generated peptide
ttgacgcgtcctctccgggc

SEQ ID NO: 4559 - DNA, 20 bp, Artificial
  Synthetically generated peptide
tgacgcgtcctctccgggca

SEQ ID NO: 4560 - DNA, 20 bp, Artificial
  Synthetically generated peptide
gacgcgtcctctccgggcac

SEQ ID NO: 4561 - DNA, 20 bp, Artificial
  Synthetically generated peptide
acgcgtcctctccgggcact

SEQ ID NO: 4562 - DNA, 20 bp, Artificial
  Synthetically generated peptide
cgcgtcctctccgggcactt

SEQ ID NO: 4563 - DNA, 20 bp, Artificial
  Synthetically generated peptide
gcgtcctctccgggcacttt

SEQ ID NO: 4564 - DNA, 20 bp, Artificial
  Synthetically generated peptide
cgtcctctccgggcacttta

SEQ ID NO: 4565 - DNA, 20 bp, Artificial
  Synthetically generated peptide
gtcctctccgggcactttaa

SEQ ID NO: 4566 - DNA, 20 bp, Artificial
  Synthetically generated peptide
tcctctccgggcactttaat

SEQ ID NO: 4567 - DNA, 20 bp, Artificial
  Synthetically generated peptide
cctctccgggcactttaata

SEQ ID NO: 4568 - DNA, 20 bp, Artificial
  Synthetically generated peptide
ctctccgggcactttaatac

SEQ ID NO: 4569 - DNA, 20 bp, Artificial
  Synthetically generated peptide
tctccgggcactttaatacc

SEQ ID NO: 4570 - DNA, 20 bp, Artificial
  Synthetically generated peptide
ctccgggcactttaatacca

SEQ ID NO: 4571 - DNA, 20 bp, Artificial
  Synthetically generated peptide
tccgggcactttaataccaa

SEQ ID NO: 4572 - DNA, 20 bp, Artificial
  Synthetically generated peptide
ccgggcactttaataccaaa

SEQ ID NO: 4573 - DNA, 20 bp, Artificial
  Synthetically generated peptide
actttgacgcgtcctctccg

SEQ ID NO: 4574 - DNA, 20 bp, Artificial
  Synthetically generated peptide
aactttgacgcgtcctctcc

SEQ ID NO: 4575 - DNA, 20 bp, Artificial
  Synthetically generated peptide
caactttgacgcgtcctctc

SEQ ID NO: 4576 - DNA, 20 bp, Artificial
  Synthetically generated peptide
ccaactttgacgcgtcctct

SEQ ID NO: 4577 - DNA, 20 bp, Artificial
  Synthetically generated peptide
tccaactttgacgcgtcctc

SEQ ID NO: 4578 - DNA, 20 bp, Artificial
  Synthetically generated peptide
gtccaactttgacgcgtcct

SEQ ID NO: 4579 - DNA, 20 bp, Artificial
  Synthetically generated peptide
tgtccaactttgacgcgtcc

SEQ ID NO: 4580 - DNA, 20 bp, Artificial
  Synthetically generated peptide
gtgtccaactttgacgcgtc

SEQ ID NO: 4581 - DNA, 20 bp, Artificial
  Synthetically generated peptide
agtgtccaactttgacgcgt

SEQ ID NO: 4582 - DNA, 20 bp, Artificial
  Synthetically generated peptide
cagtgtccaactttgacgcg

SEQ ID NO: 4583 - DNA, 20 bp, Artificial
  Synthetically generated peptide
acagtgtccaactttgacgc

SEQ ID NO: 4584 - DNA, 20 bp, Artificial
  Synthetically generated peptide
cacagtgtccaactttgacg

SEQ ID NO: 4585 - DNA, 27 bp, Artificial
  Synthetically generated peptide
cggctccgccacttgacagctatgtgg

SEQ ID NO: 4586 - DNA, 20 bp, Artificial
  Synthetically generated peptide
ggctccgccacttgacagct

SEQ ID NO: 4587 - DNA, 20 bp, Artificial
  Synthetically generated peptide
gctccgccacttgacagcta

SEQ ID NO: 4588 - DNA, 20 bp, Artificial
  Synthetically generated peptide
ctccgccacttgacagctat

SEQ ID NO: 4589 - DNA, 20 bp, Artificial
  Synthetically generated peptide
tccgccacttgacagctatg

SEQ ID NO: 4590 - DNA, 20 bp, Artificial
  Synthetically generated peptide
ccgccacttgacagctatgt

SEQ ID NO: 4591 - DNA, 20 bp, Artificial
  Synthetically generated peptide
cgccacttgacagctatgtg

SEQ ID NO: 4592 - DNA, 20 bp, Artificial
  Synthetically generated peptide
acggctccgccacttgacag

SEQ ID NO: 4593 - DNA, 20 bp, Artificial
  Synthetically generated peptide
cacggctccgccacttgaca

SEQ ID NO: 4594 - DNA, 20 bp, Artificial
  Synthetically generated peptide
tcacggctccgccacttgac

SEQ ID NO: 4595 - DNA, 20 bp, Artificial
  Synthetically generated peptide
atcacggctccgccacttga

SEQ ID NO: 4596 - DNA, 20 bp, Artificial
  Synthetically generated peptide
aatcacggctccgccacttg

SEQ ID NO: 4597 - DNA, 20 bp, Artificial
  Synthetically generated peptide
aaatcacggctccgccactt

SEQ ID NO: 4598 - DNA, 20 bp, Artificial
  Synthetically generated peptide
caaatcacggctccgccact

SEQ ID NO: 4599 - DNA, 20 bp, Artificial
  Synthetically generated peptide
ccaaatcacggctccgccac

SEQ ID NO: 4600 - DNA, 20 bp, Artificial
  Synthetically generated peptide
accaaatcacggctccgcca

SEQ ID NO: 4601 - DNA, 20 bp, Artificial
  Synthetically generated peptide
taccaaatcacggctccgcc

SEQ ID NO: 4602 - DNA, 20 bp, Artificial
  Synthetically generated peptide
ataccaaatcacggctccgc

SEQ ID NO: 4603 - DNA, 20 bp, Artificial
  Synthetically generated peptide
aataccaaatcacggctccg

SEQ ID NO: 4604 - DNA, 20 bp, Artificial
  Synthetically generated peptide
taataccaaatcacggctcc

SEQ ID NO: 4605 - DNA, 30 bp, Artificial
  Synthetically generated peptide
aggcggagattgcggtgagccgaaatcgcg

SEQ ID NO: 4606 - DNA, 20 bp, Artificial
  Synthetically generated peptide
ggcggagattgcggtgagcc

SEQ ID NO: 4607 - DNA, 20 bp, Artificial
  Synthetically generated peptide
gcggagattgcggtgagccg

SEQ ID NO: 4608 - DNA, 20 bp, Artificial
  Synthetically generated peptide
cggagattgcggtgagccga

SEQ ID NO: 4609 - DNA, 30 bp, Artificial
  Synthetically generated peptide
aggccgccccaacgtcctgtcgttcggcgg

SEQ ID NO: 4610 - DNA, 20 bp, Artificial
  Synthetically generated peptide
ggccgccccaacgtcctgtc

SEQ ID NO: 4611 - DNA, 20 bp, Artificial
  Synthetically generated peptide
gccgccccaacgtcctgtcg

SEQ ID NO: 4612 - DNA, 20 bp, Artificial
  Synthetically generated peptide
ccgccccaacgtcctgtcgt

SEQ ID NO: 4613 - DNA, 20 bp, Artificial
  Synthetically generated peptide
cgccccaacgtcctgtcgtt

SEQ ID NO: 4614 - DNA, 20 bp, Artificial
  Synthetically generated peptide
gccccaacgtcctgtcgttc

SEQ ID NO: 4615 - DNA, 20 bp, Artificial
  Synthetically generated peptide
ccccaacgtcctgtcgttcg

SEQ ID NO: 4616 - DNA, 20 bp, Artificial
  Synthetically generated peptide
cccaacgtcctgtcgttcgg

SEQ ID NO: 4617 - DNA, 20 bp, Artificial
  Synthetically generated peptide
ccaacgtcctgtcgttcggc

SEQ ID NO: 4618 - DNA, 20 bp, Artificial
  Synthetically generated peptide
caacgtcctgtcgttcggcg

SEQ ID NO: 4619 - DNA, 20 bp, Artificial
  Synthetically generated peptide
aacgtcctgtcgttcggcgg

SEQ ID NO: 4620 - DNA, 20 bp, Artificial
  Synthetically generated peptide
acgtcctgtcgttcggcggc

SEQ ID NO: 4621 - DNA, 20 bp, Artificial
  Synthetically generated peptide
cgtcctgtcgttcggcggca

SEQ ID NO: 4622 - DNA, 20 bp, Artificial
  Synthetically generated peptide
gtcctgtcgttcggcggcag

SEQ ID NO: 4623 - DNA, 20 bp, Artificial
  Synthetically generated peptide
tcctgtcgttcggcggcagc

SEQ ID NO: 4624 - DNA, 20 bp, Artificial
  Synthetically generated peptide
cctgtcgttcggcggcagct

SEQ ID NO: 4625 - DNA, 20 bp, Artificial
  Synthetically generated peptide
ctgtcgttcggcggcagctt

SEQ ID NO: 4626 - DNA, 20 bp, Artificial
  Synthetically generated peptide
tgtcgttcggcggcagcttc

SEQ ID NO: 4627 - DNA, 20 bp, Artificial
  Synthetically generated peptide
gtcgttcggcggcagcttct

SEQ ID NO: 4628 - DNA, 20 bp, Artificial
  Synthetically generated peptide
tcgttcggcggcagcttctc

SEQ ID NO: 4629 - DNA, 20 bp, Artificial
  Synthetically generated peptide
cgttcggcggcagcttctcg

SEQ ID NO: 4630 - DNA, 20 bp, Artificial
  Synthetically generated peptide
gttcggcggcagcttctcgc

SEQ ID NO: 4631 - DNA, 20 bp, Artificial
  Synthetically generated peptide
ttcggcggcagcttctcgcc

SEQ ID NO: 4632 - DNA, 20 bp, Artificial
  Synthetically generated peptide
tcggcggcagcttctcgccc

SEQ ID NO: 4633 - DNA, 20 bp, Artificial
  Synthetically generated peptide
cggcggcagcttctcgcccg

SEQ ID NO: 4634 - DNA, 20 bp, Artificial
  Synthetically generated peptide
ggcggcagcttctcgcccgc

SEQ ID NO: 4635 - DNA, 20 bp, Artificial
  Synthetically generated peptide
gcggcagcttctcgcccgct

SEQ ID NO: 4636 - DNA, 20 bp, Artificial
  Synthetically generated peptide
cggcagcttctcgcccgctc

SEQ ID NO: 4637 - DNA, 20 bp, Artificial
  Synthetically generated peptide
ggcagcttctcgcccgctcc

SEQ ID NO: 4638 - DNA, 20 bp, Artificial
  Synthetically generated peptide
gcagcttctcgcccgctcct

SEQ ID NO: 4639 - DNA, 20 bp, Artificial
  Synthetically generated peptide
cagcttctcgcccgctcctc

SEQ ID NO: 4640 - DNA, 20 bp, Artificial
  Synthetically generated peptide
agcttctcgcccgctcctcc

SEQ ID NO: 4641 - DNA, 20 bp, Artificial
  Synthetically generated peptide
gcttctcgcccgctcctcct

SEQ ID NO: 4642 - DNA, 20 bp, Artificial
  Synthetically generated peptide
cttctcgcccgctcctcctc

SEQ ID NO: 4643 - DNA, 20 bp, Artificial
  Synthetically generated peptide
ttctcgcccgctcctcctcc

SEQ ID NO: 4644 - DNA, 20 bp, Artificial
  Synthetically generated peptide
tctcgcccgctcctcctccc

SEQ ID NO: 4645 - DNA, 20 bp, Artificial
  Synthetically generated peptide
ctcgcccgctcctcctcccc

SEQ ID NO: 4646 - DNA, 20 bp, Artificial
  Synthetically generated peptide
tcgcccgctcctcctccccg

SEQ ID NO: 4647 - DNA, 20 bp, Artificial
  Synthetically generated peptide
cgcccgctcctcctccccgc

SEQ ID NO: 4648 - DNA, 20 bp, Artificial
  Synthetically generated peptide
gcccgctcctcctccccgcg

SEQ ID NO: 4649 - DNA, 20 bp, Artificial
  Synthetically generated peptide
cccgctcctcctccccgcgg

SEQ ID NO: 4650 - DNA, 20 bp, Artificial
  Synthetically generated peptide
ccgctcctcctccccgcggc

SEQ ID NO: 4651 - DNA, 20 bp, Artificial
  Synthetically generated peptide
cgctcctcctccccgcggcg

SEQ ID NO: 4652 - DNA, 20 bp, Artificial
  Synthetically generated peptide
gctcctcctccccgcggcgg

SEQ ID NO: 4653 - DNA, 20 bp, Artificial
  Synthetically generated peptide
ctcctcctccccgcggcggg

SEQ ID NO: 4654 - DNA, 20 bp, Artificial
  Synthetically generated peptide
tcctcctccccgcggcgggt

SEQ ID NO: 4655 - DNA, 20 bp, Artificial
  Synthetically generated peptide
cctcctccccgcggcgggtg

SEQ ID NO: 4656 - DNA, 20 bp, Artificial
  Synthetically generated peptide
ctcctccccgcggcgggtga

SEQ ID NO: 4657 - DNA, 20 bp, Artificial
  Synthetically generated peptide
tcctccccgcggcgggtgag

SEQ ID NO: 4658 - DNA, 20 bp, Artificial
  Synthetically generated peptide
cctccccgcggcgggtgagg

SEQ ID NO: 4659 - DNA, 20 bp, Artificial
  Synthetically generated peptide
ctccccgcggcgggtgaggg

SEQ ID NO: 4660 - DNA, 20 bp, Artificial
  Synthetically generated peptide
tccccgcggcgggtgaggga

SEQ ID NO: 4661 - DNA, 20 bp, Artificial
  Synthetically generated peptide
ccccgcggcgggtgagggag

SEQ ID NO: 4662 - DNA, 20 bp, Artificial
  Synthetically generated peptide
cccgcggcgggtgagggagc

SEQ ID NO: 4663 - DNA, 20 bp, Artificial
  Synthetically generated peptide
caggccgccccaacgtcctg

SEQ ID NO: 4664 - DNA, 20 bp, Artificial
  Synthetically generated peptide
ccaggccgccccaacgtcct

SEQ ID NO: 4665 - DNA, 20 bp, Artificial
  Synthetically generated peptide
gccaggccgccccaacgtcc

SEQ ID NO: 4666 - DNA, 20 bp, Artificial
  Synthetically generated peptide
agccaggccgccccaacgtc

SEQ ID NO: 4667 - DNA, 20 bp, Artificial
  Synthetically generated peptide
gagccaggccgccccaacgt

SEQ ID NO: 4668 - DNA, 20 bp, Artificial
  Synthetically generated peptide
ggagccaggccgccccaacg

SEQ ID NO: 4669 - DNA, 20 bp, Artificial
  Synthetically generated peptide
gggagccaggccgccccaac

SEQ ID NO: 4670 - DNA, 20 bp, Artificial
  Synthetically generated peptide
agggagccaggccgccccaa

SEQ ID NO: 4671 - DNA, 20 bp, Artificial
  Synthetically generated peptide
gagggagccaggccgcccca

SEQ ID NO: 4672 - DNA, 20 bp, Artificial
  Synthetically generated peptide
tgagggagccaggccgcccc

SEQ ID NO: 4673 - DNA, 20 bp, Artificial
  Synthetically generated peptide
ctgagggagccaggccgccc

SEQ ID NO: 4674 - DNA, 20 bp, Artificial
  Synthetically generated peptide
cctgagggagccaggccgcc

SEQ ID NO: 4675 - DNA, 20 bp, Artificial
  Synthetically generated peptide
acctgagggagccaggccgc

SEQ ID NO: 4676 - DNA, 20 bp, Artificial
  Synthetically generated peptide
tacctgagggagccaggccg

SEQ ID NO: 4677 - DNA, 31 bp, Artificial
  Synthetically generated peptide
tctcgcccgctcctcctccccgcggcgggtg

SEQ ID NO: 4678 - DNA, 20 bp, Artificial
  Synthetically generated peptide
ctcgcccgctcctcctcccc

SEQ ID NO: 4679 - DNA, 20 bp, Artificial
  Synthetically generated peptide
tcgcccgctcctcctccccg

SEQ ID NO: 4680 - DNA, 20 bp, Artificial
  Synthetically generated peptide
cgcccgctcctcctccccgc

SEQ ID NO: 4681 - DNA, 20 bp, Artificial
  Synthetically generated peptide
gcccgctcctcctccccgcg

SEQ ID NO: 4682 - DNA, 20 bp, Artificial
  Synthetically generated peptide
cccgctcctcctccccgcgg

SEQ ID NO: 4683 - DNA, 20 bp, Artificial
  Synthetically generated peptide
ccgctcctcctccccgcggc

SEQ ID NO: 4684 - DNA, 20 bp, Artificial
  Synthetically generated peptide
cgctcctcctccccgcggcg

SEQ ID NO: 4685 - DNA, 20 bp, Artificial
  Synthetically generated peptide
gctcctcctccccgcggcgg

SEQ ID NO: 4686 - DNA, 20 bp, Artificial
  Synthetically generated peptide
ctcctcctccccgcggcggg

SEQ ID NO: 4687 - DNA, 20 bp, Artificial
  Synthetically generated peptide
tcctcctccccgcggcgggt

SEQ ID NO: 4688 - DNA, 20 bp, Artificial
  Synthetically generated peptide
cctcctccccgcggcgggtg

SEQ ID NO: 4689 - DNA, 20 bp, Artificial
  Synthetically generated peptide
ctcctccccgcggcgggtga

SEQ ID NO: 4690 - DNA, 20 bp, Artificial
  Synthetically generated peptide
tcctccccgcggcgggtgag

SEQ ID NO: 4691 - DNA, 20 bp, Artificial
  Synthetically generated peptide
cctccccgcggcgggtgagg

SEQ ID NO: 4692 - DNA, 20 bp, Artificial
  Synthetically generated peptide
ctccccgcggcgggtgaggg

SEQ ID NO: 4693 - DNA, 20 bp, Artificial
  Synthetically generated peptide
tccccgcggcgggtgaggga

SEQ ID NO: 4694 - DNA, 20 bp, Artificial
  Synthetically generated peptide
ccccgcggcgggtgagggag

SEQ ID NO: 4695 - DNA, 20 bp, Artificial
  Synthetically generated peptide
cccgcggcgggtgagggagc

SEQ ID NO: 4696 - DNA, 20 bp, Artificial
  Synthetically generated peptide
ttctcgcccgctcctcctcc

SEQ ID NO: 4697 - DNA, 20 bp, Artificial
  Synthetically generated peptide
cttctcgcccgctcctcctc

SEQ ID NO: 4698 - DNA, 20 bp, Artificial
  Synthetically generated peptide
gcttctcgcccgctcctcct

SEQ ID NO: 4699 - DNA, 20 bp, Artificial
  Synthetically generated peptide
agcttctcgcccgctcctcc

SEQ ID NO: 4700 - DNA, 20 bp, Artificial
  Synthetically generated peptide
cagcttctcgcccgctcctc

SEQ ID NO: 4701 - DNA, 20 bp, Artificial
  Synthetically generated peptide
gcagcttctcgcccgctcct

SEQ ID NO: 4702 - DNA, 20 bp, Artificial
  Synthetically generated peptide
ggcagcttctcgcccgctcc

SEQ ID NO: 4703 - DNA, 20 bp, Artificial
  Synthetically generated peptide
cggcagcttctcgcccgctc

SEQ ID NO: 4704 - DNA, 20 bp, Artificial
  Synthetically generated peptide
gcggcagcttctcgcccgct

SEQ ID NO: 4705 - DNA, 20 bp, Artificial
  Synthetically generated peptide
ggcggcagcttctcgcccgc

SEQ ID NO: 4706 - DNA, 20 bp, Artificial
  Synthetically generated peptide
cggcggcagcttctcgcccg

SEQ ID NO: 4707 - DNA, 20 bp, Artificial
  Synthetically generated peptide
tcggcggcagcttctcgccc

SEQ ID NO: 4708 - DNA, 20 bp, Artificial
  Synthetically generated peptide
ttcggcggcagcttctcgcc

SEQ ID NO: 4709 - DNA, 20 bp, Artificial
  Synthetically generated peptide
gttcggcggcagcttctcgc

SEQ ID NO: 4710 - DNA, 20 bp, Artificial
  Synthetically generated peptide
cgttcggcggcagcttctcg

SEQ ID NO: 4711 - DNA, 20 bp, Artificial
  Synthetically generated peptide
tcgttcggcggcagcttctc

SEQ ID NO: 4712 - DNA, 20 bp, Artificial
  Synthetically generated peptide
gtcgttcggcggcagcttct

SEQ ID NO: 4713 - DNA, 20 bp, Artificial
  Synthetically generated peptide
tgtcgttcggcggcagcttc

SEQ ID NO: 4714 - DNA, 20 bp, Artificial
  Synthetically generated peptide
ctgtcgttcggcggcagctt

SEQ ID NO: 4715 - DNA, 20 bp, Artificial
  Synthetically generated peptide
cctgtcgttcggcggcagct

SEQ ID NO: 4716 - DNA, 20 bp, Artificial
  Synthetically generated peptide
tcctgtcgttcggcggcagc

SEQ ID NO: 4717 - DNA, 20 bp, Artificial
  Synthetically generated peptide
gtcctgtcgttcggcggcag

SEQ ID NO: 4718 - DNA, 20 bp, Artificial
  Synthetically generated peptide
cgtcctgtcgttcggcggca

SEQ ID NO: 4719 - DNA, 20 bp, Artificial
  Synthetically generated peptide
acgtcctgtcgttcggcggc

SEQ ID NO: 4720 - DNA, 20 bp, Artificial
  Synthetically generated peptide
aacgtcctgtcgttcggcgg

SEQ ID NO: 4721 - DNA, 20 bp, Artificial
  Synthetically generated peptide
caacgtcctgtcgttcggcg

SEQ ID NO: 4722 - DNA, 20 bp, Artificial
  Synthetically generated peptide
ccaacgtcctgtcgttcggc

SEQ ID NO: 4723 - DNA, 20 bp, Artificial
  Synthetically generated peptide
cccaacgtcctgtcgttcgg

SEQ ID NO: 4724 - DNA, 20 bp, Artificial
  Synthetically generated peptide
ccccaacgtcctgtcgttcg

SEQ ID NO: 4725 - DNA, 20 bp, Artificial
  Synthetically generated peptide
gccccaacgtcctgtcgttc

SEQ ID NO: 4726 - DNA, 20 bp, Artificial
  Synthetically generated peptide
cgccccaacgtcctgtcgtt

SEQ ID NO: 4727 - DNA, 20 bp, Artificial
  Synthetically generated peptide
ccgccccaacgtcctgtcgt

SEQ ID NO: 4728 - DNA, 20 bp, Artificial
  Synthetically generated peptide
gccgccccaacgtcctgtcg

SEQ ID NO: 4729 - DNA, 20 bp, Artificial
  Synthetically generated peptide
ggccgccccaacgtcctgtc

SEQ ID NO: 4730 - DNA, 20 bp, Artificial
  Synthetically generated peptide
aggccgccccaacgtcctgt

SEQ ID NO: 4731 - DNA, 20 bp, Artificial
  Synthetically generated peptide
caggccgccccaacgtcctg

SEQ ID NO: 4732 - DNA, 20 bp, Artificial
  Synthetically generated peptide
ccaggccgccccaacgtcct

SEQ ID NO: 4733 - DNA, 20 bp, Artificial
  Synthetically generated peptide
gccaggccgccccaacgtcc

SEQ ID NO: 4734 - DNA, 20 bp, Artificial
  Synthetically generated peptide
agccaggccgccccaacgtc

SEQ ID NO: 4735 - DNA, 20 bp, Artificial
  Synthetically generated peptide
gagccaggccgccccaacgt

SEQ ID NO: 4736 - DNA, 20 bp, Artificial
  Synthetically generated peptide
ggagccaggccgccccaacg

SEQ ID NO: 4737 - DNA, 20 bp, Artificial
  Synthetically generated peptide
gggagccaggccgccccaac

SEQ ID NO: 4738 - DNA, 20 bp, Artificial
  Synthetically generated peptide
agggagccaggccgccccaa

SEQ ID NO: 4739 - DNA, 20 bp, Artificial
  Synthetically generated peptide
gagggagccaggccgcccca

SEQ ID NO: 4740 - DNA, 20 bp, Artificial
  Synthetically generated peptide
tgagggagccaggccgcccc

SEQ ID NO: 4741 - DNA, 20 bp, Artificial
  Synthetically generated peptide
ctgagggagccaggccgccc

SEQ ID NO: 4742 - DNA, 20 bp, Artificial
  Synthetically generated peptide
cctgagggagccaggccgcc

SEQ ID NO: 4743 - DNA, 20 bp, Artificial
  Synthetically generated peptide
acctgagggagccaggccgc

SEQ ID NO: 4744 - DNA, 20 bp, Artificial
  Synthetically generated peptide
tacctgagggagccaggccg

SEQ ID NO: 4745 - DNA, 24 bp, Artificial
  Synthetically generated peptide
cgggaggcggtcacattcggcgcg

SEQ ID NO: 4746 - DNA, 20 bp, Artificial
  Synthetically generated peptide
gggaggcggtcacattcggc

SEQ ID NO: 4747 - DNA, 20 bp, Artificial
  Synthetically generated peptide
ggaggcggtcacattcggcg

SEQ ID NO: 4748 - DNA, 20 bp, Artificial
  Synthetically generated peptide
gaggcggtcacattcggcgc

SEQ ID NO: 4749 - DNA, 20 bp, Artificial
  Synthetically generated peptide
aggcggtcacattcggcgcg

SEQ ID NO: 4750 - DNA, 20 bp, Artificial
  Synthetically generated peptide
ggcggtcacattcggcgcgt

SEQ ID NO: 4751 - DNA, 20 bp, Artificial
  Synthetically generated peptide
gcggtcacattcggcgcgtc

SEQ ID NO: 4752 - DNA, 20 bp, Artificial
  Synthetically generated peptide
cggtcacattcggcgcgtcc

SEQ ID NO: 4753 - DNA, 20 bp, Artificial
  Synthetically generated peptide
ggtcacattcggcgcgtccc

SEQ ID NO: 4754 - DNA, 20 bp, Artificial
  Synthetically generated peptide
gtcacattcggcgcgtcccc

SEQ ID NO: 4755 - DNA, 20 bp, Artificial
  Synthetically generated peptide
tcacattcggcgcgtcccca

SEQ ID NO: 4756 - DNA, 20 bp, Artificial
  Synthetically generated peptide
cacattcggcgcgtccccag

SEQ ID NO: 4757 - DNA, 20 bp, Artificial
  Synthetically generated peptide
acattcggcgcgtccccagc

SEQ ID NO: 4758 - DNA, 20 bp, Artificial
  Synthetically generated peptide
cattcggcgcgtccccagcc

SEQ ID NO: 4759 - DNA, 20 bp, Artificial
  Synthetically generated peptide
attcggcgcgtccccagccc

SEQ ID NO: 4760 - DNA, 20 bp, Artificial
  Synthetically generated peptide
ttcggcgcgtccccagccca

SEQ ID NO: 4761 - DNA, 20 bp, Artificial
  Synthetically generated peptide
tcggcgcgtccccagcccag

SEQ ID NO: 4762 - DNA, 20 bp, Artificial
  Synthetically generated peptide
cggcgcgtccccagcccagg

SEQ ID NO: 4763 - DNA, 20 bp, Artificial
  Synthetically generated peptide
ggcgcgtccccagcccaggg

SEQ ID NO: 4764 - DNA, 20 bp, Artificial
  Synthetically generated peptide
gcgcgtccccagcccagggg

SEQ ID NO: 4765 - DNA, 20 bp, Artificial
  Synthetically generated peptide
cgcgtccccagcccagggga

SEQ ID NO: 4766 - DNA, 20 bp, Artificial
  Synthetically generated peptide
gcgtccccagcccaggggac

SEQ ID NO: 4767 - DNA, 20 bp, Artificial
  Synthetically generated peptide
cgtccccagcccaggggacg

SEQ ID NO: 4768 - DNA, 20 bp, Artificial
  Synthetically generated peptide
gtccccagcccaggggacgg

SEQ ID NO: 4769 - DNA, 20 bp, Artificial
  Synthetically generated peptide
tccccagcccaggggacgga

SEQ ID NO: 4770 - DNA, 20 bp, Artificial
  Synthetically generated peptide
ccccagcccaggggacggag

SEQ ID NO: 4771 - DNA, 20 bp, Artificial
  Synthetically generated peptide
cccagcccaggggacggagc

SEQ ID NO: 4772 - DNA, 20 bp, Artificial
  Synthetically generated peptide
ccagcccaggggacggagcc

SEQ ID NO: 4773 - DNA, 20 bp, Artificial
  Synthetically generated peptide
cagcccaggggacggagccc

SEQ ID NO: 4774 - DNA, 20 bp, Artificial
  Synthetically generated peptide
agcccaggggacggagcccc

SEQ ID NO: 4775 - DNA, 20 bp, Artificial
  Synthetically generated peptide
gcccaggggacggagccccg

SEQ ID NO: 4776 - DNA, 20 bp, Artificial
  Synthetically generated peptide
cccaggggacggagccccga

SEQ ID NO: 4777 - DNA, 20 bp, Artificial
  Synthetically generated peptide
ccaggggacggagccccgag

SEQ ID NO: 4778 - DNA, 20 bp, Artificial
  Synthetically generated peptide
caggggacggagccccgagc

SEQ ID NO: 4779 - DNA, 20 bp, Artificial
  Synthetically generated peptide
gcgggaggcggtcacattcg

SEQ ID NO: 4780 - DNA, 20 bp, Artificial
  Synthetically generated peptide
agcgggaggcggtcacattc

SEQ ID NO: 4781 - DNA, 20 bp, Artificial
  Synthetically generated peptide
gagcgggaggcggtcacatt

SEQ ID NO: 4782 - DNA, 26 bp, Artificial
  Synthetically generated peptide
cggagccccgagcagcccccgcatcg

SEQ ID NO: 4783 - DNA, 20 bp, Artificial
  Synthetically generated peptide
ggagccccgagcagcccccg

SEQ ID NO: 4784 - DNA, 20 bp, Artificial
  Synthetically generated peptide
gagccccgagcagcccccgc

SEQ ID NO: 4785 - DNA, 20 bp, Artificial
  Synthetically generated peptide
agccccgagcagcccccgca

SEQ ID NO: 4786 - DNA, 20 bp, Artificial
  Synthetically generated peptide
gccccgagcagcccccgcat

SEQ ID NO: 4787 - DNA, 20 bp, Artificial
  Synthetically generated peptide
ccccgagcagcccccgcatc

SEQ ID NO: 4788 - DNA, 20 bp, Artificial
  Synthetically generated peptide
cccgagcagcccccgcatcg

SEQ ID NO: 4789 - DNA, 20 bp, Artificial
  Synthetically generated peptide
ccgagcagcccccgcatcgt

SEQ ID NO: 4790 - DNA, 20 bp, Artificial
  Synthetically generated peptide
cgagcagcccccgcatcgta

SEQ ID NO: 4791 - DNA, 20 bp, Artificial
  Synthetically generated peptide
gagcagcccccgcatcgtag

SEQ ID NO: 4792 - DNA, 20 bp, Artificial
  Synthetically generated peptide
agcagcccccgcatcgtagc

SEQ ID NO: 4793 - DNA, 20 bp, Artificial
  Synthetically generated peptide
gcagcccccgcatcgtagca

SEQ ID NO: 4794 - DNA, 20 bp, Artificial
  Synthetically generated peptide
cagcccccgcatcgtagcaa

SEQ ID NO: 4795 - DNA, 20 bp, Artificial
  Synthetically generated peptide
agcccccgcatcgtagcaaa

SEQ ID NO: 4796 - DNA, 20 bp, Artificial
  Synthetically generated peptide
gcccccgcatcgtagcaaac

SEQ ID NO: 4797 - DNA, 20 bp, Artificial
  Synthetically generated peptide
cccccgcatcgtagcaaacg

SEQ ID NO: 4798 - DNA, 20 bp, Artificial
  Synthetically generated peptide
ccccgcatcgtagcaaacgc

SEQ ID NO: 4799 - DNA, 20 bp, Artificial
  Synthetically generated peptide
cccgcatcgtagcaaacgcg

SEQ ID NO: 4800 - DNA, 20 bp, Artificial
  Synthetically generated peptide
ccgcatcgtagcaaacgcgc

SEQ ID NO: 4801 - DNA, 20 bp, Artificial
  Synthetically generated peptide
cgcatcgtagcaaacgcgct

SEQ ID NO: 4802 - DNA, 20 bp, Artificial
  Synthetically generated peptide
gcatcgtagcaaacgcgctc

SEQ ID NO: 4803 - DNA, 20 bp, Artificial
  Synthetically generated peptide
catcgtagcaaacgcgctcc

SEQ ID NO: 4804 - DNA, 20 bp, Artificial
  Synthetically generated peptide
atcgtagcaaacgcgctccg

SEQ ID NO: 4805 - DNA, 20 bp, Artificial
  Synthetically generated peptide
tcgtagcaaacgcgctccgc

SEQ ID NO: 4806 - DNA, 20 bp, Artificial
  Synthetically generated peptide
cgtagcaaacgcgctccgcg

SEQ ID NO: 4807 - DNA, 20 bp, Artificial
  Synthetically generated peptide
gtagcaaacgcgctccgcgc

SEQ ID NO: 4808 - DNA, 20 bp, Artificial
  Synthetically generated peptide
tagcaaacgcgctccgcgcc

SEQ ID NO: 4809 - DNA, 20 bp, Artificial
  Synthetically generated peptide
agcaaacgcgctccgcgcct

SEQ ID NO: 4810 - DNA, 20 bp, Artificial
  Synthetically generated peptide
gcaaacgcgctccgcgcctc

SEQ ID NO: 4811 - DNA, 20 bp, Artificial
  Synthetically generated peptide
caaacgcgctccgcgcctca

SEQ ID NO: 4812 - DNA, 20 bp, Artificial
  Synthetically generated peptide
aaacgcgctccgcgcctcag

SEQ ID NO: 4813 - DNA, 20 bp, Artificial
  Synthetically generated peptide
aacgcgctccgcgcctcagg

SEQ ID NO: 4814 - DNA, 20 bp, Artificial
  Synthetically generated peptide
acgcgctccgcgcctcaggg

SEQ ID NO: 4815 - DNA, 20 bp, Artificial
  Synthetically generated peptide
cgcgctccgcgcctcagggc

SEQ ID NO: 4816 - DNA, 20 bp, Artificial
  Synthetically generated peptide
gcgctccgcgcctcagggca

SEQ ID NO: 4817 - DNA, 20 bp, Artificial
  Synthetically generated peptide
cgctccgcgcctcagggcac

SEQ ID NO: 4818 - DNA, 20 bp, Artificial
  Synthetically generated peptide
gctccgcgcctcagggcacg

SEQ ID NO: 4819 - DNA, 20 bp, Artificial
  Synthetically generated peptide
ctccgcgcctcagggcacgc

SEQ ID NO: 4820 - DNA, 20 bp, Artificial
  Synthetically generated peptide
tccgcgcctcagggcacgcg

SEQ ID NO: 4821 - DNA, 20 bp, Artificial
  Synthetically generated peptide
ccgcgcctcagggcacgcgc

SEQ ID NO: 4822 - DNA, 20 bp, Artificial
  Synthetically generated peptide
cgcgcctcagggcacgcgcc

SEQ ID NO: 4823 - DNA, 20 bp, Artificial
  Synthetically generated peptide
gcgcctcagggcacgcgccc

SEQ ID NO: 4824 - DNA, 20 bp, Artificial
  Synthetically generated peptide
cgcctcagggcacgcgcccc

SEQ ID NO: 4825 - DNA, 20 bp, Artificial
  Synthetically generated peptide
gcctcagggcacgcgcccca

SEQ ID NO: 4826 - DNA, 20 bp, Artificial
  Synthetically generated peptide
cctcagggcacgcgccccaa

SEQ ID NO: 4827 - DNA, 20 bp, Artificial
  Synthetically generated peptide
ctcagggcacgcgccccaaa

SEQ ID NO: 4828 - DNA, 20 bp, Artificial
  Synthetically generated peptide
tcagggcacgcgccccaaag

SEQ ID NO: 4829 - DNA, 20 bp, Artificial
  Synthetically generated peptide
cagggcacgcgccccaaagc

SEQ ID NO: 4830 - DNA, 20 bp, Artificial
  Synthetically generated peptide
agggcacgcgccccaaagcc

SEQ ID NO: 4831 - DNA, 20 bp, Artificial
  Synthetically generated peptide
gggcacgcgccccaaagccc

SEQ ID NO: 4832 - DNA, 20 bp, Artificial
  Synthetically generated peptide
ggcacgcgccccaaagcccg

SEQ ID NO: 4833 - DNA, 20 bp, Artificial
  Synthetically generated peptide
gcacgcgccccaaagcccgg

SEQ ID NO: 4834 - DNA, 20 bp, Artificial
  Synthetically generated peptide
cacgcgccccaaagcccggc

SEQ ID NO: 4835 - DNA, 20 bp, Artificial
  Synthetically generated peptide
acgcgccccaaagcccggcc

SEQ ID NO: 4836 - DNA, 20 bp, Artificial
  Synthetically generated peptide
cgcgccccaaagcccggcca

SEQ ID NO: 4837 - DNA, 20 bp, Artificial
  Synthetically generated peptide
gcgccccaaagcccggccag

SEQ ID NO: 4838 - DNA, 20 bp, Artificial
  Synthetically generated peptide
cgccccaaagcccggccagc

SEQ ID NO: 4839 - DNA, 20 bp, Artificial
  Synthetically generated peptide
gccccaaagcccggccagct

SEQ ID NO: 4840 - DNA, 20 bp, Artificial
  Synthetically generated peptide
ccccaaagcccggccagctg

SEQ ID NO: 4841 - DNA, 20 bp, Artificial
  Synthetically generated peptide
cccaaagcccggccagctga

SEQ ID NO: 4842 - DNA, 20 bp, Artificial
  Synthetically generated peptide
ccaaagcccggccagctgac

SEQ ID NO: 4843 - DNA, 20 bp, Artificial
  Synthetically generated peptide
caaagcccggccagctgacc

SEQ ID NO: 4844 - DNA, 20 bp, Artificial
  Synthetically generated peptide
aaagcccggccagctgaccc

SEQ ID NO: 4845 - DNA, 20 bp, Artificial
  Synthetically generated peptide
aagcccggccagctgaccct

SEQ ID NO: 4846 - DNA, 20 bp, Artificial
  Synthetically generated peptide
agcccggccagctgaccctt

SEQ ID NO: 4847 - DNA, 20 bp, Artificial
  Synthetically generated peptide
gcccggccagctgacccttt

SEQ ID NO: 4848 - DNA, 20 bp, Artificial
  Synthetically generated peptide
cccggccagctgaccctttt

SEQ ID NO: 4849 - DNA, 20 bp, Artificial
  Synthetically generated peptide
ccggccagctgacccttttc

SEQ ID NO: 4850 - DNA, 20 bp, Artificial
  Synthetically generated peptide
cggccagctgacccttttcg

SEQ ID NO: 4851 - DNA, 20 bp, Artificial
  Synthetically generated peptide
ggccagctgacccttttcgg

SEQ ID NO: 4852 - DNA, 20 bp, Artificial
  Synthetically generated peptide
gccagctgacccttttcggg

SEQ ID NO: 4853 - DNA, 20 bp, Artificial
  Synthetically generated peptide
ccagctgacccttttcgggg

SEQ ID NO: 4854 - DNA, 20 bp, Artificial
  Synthetically generated peptide
cagctgacccttttcggggc

SEQ ID NO: 4855 - DNA, 20 bp, Artificial
  Synthetically generated peptide
agctgacccttttcggggcc

SEQ ID NO: 4856 - DNA, 20 bp, Artificial
  Synthetically generated peptide
gctgacccttttcggggccc

SEQ ID NO: 4857 - DNA, 20 bp, Artificial
  Synthetically generated peptide
ctgacccttttcggggccca

SEQ ID NO: 4858 - DNA, 20 bp, Artificial
  Synthetically generated peptide
tgacccttttcggggcccaa

SEQ ID NO: 4859 - DNA, 20 bp, Artificial
  Synthetically generated peptide
gacccttttcggggcccaaa

SEQ ID NO: 4860 - DNA, 20 bp, Artificial
  Synthetically generated peptide
acccttttcggggcccaaaa

SEQ ID NO: 4861 - DNA, 20 bp, Artificial
  Synthetically generated peptide
cccttttcggggcccaaaaa

SEQ ID NO: 4862 - DNA, 20 bp, Artificial
  Synthetically generated peptide
ccttttcggggcccaaaaaa

SEQ ID NO: 4863 - DNA, 20 bp, Artificial
  Synthetically generated peptide
cttttcggggcccaaaaaag

SEQ ID NO: 4864 - DNA, 20 bp, Artificial
  Synthetically generated peptide
ttttcggggcccaaaaaagg

SEQ ID NO: 4865 - DNA, 20 bp, Artificial
  Synthetically generated peptide
tttcggggcccaaaaaaggc

SEQ ID NO: 4866 - DNA, 20 bp, Artificial
  Synthetically generated peptide
ttcggggcccaaaaaaggca

SEQ ID NO: 4867 - DNA, 20 bp, Artificial
  Synthetically generated peptide
acggagccccgagcagcccc

SEQ ID NO: 4868 - DNA, 20 bp, Artificial
  Synthetically generated peptide
gacggagccccgagcagccc

SEQ ID NO: 4869 - DNA, 20 bp, Artificial
  Synthetically generated peptide
ggacggagccccgagcagcc

SEQ ID NO: 4870 - DNA, 20 bp, Artificial
  Synthetically generated peptide
gggacggagccccgagcagc

SEQ ID NO: 4871 - DNA, 27 bp, Artificial
  Synthetically generated peptide
cgcgctccgcgcctcagggcacgcgcc

SEQ ID NO: 4872 - DNA, 20 bp, Artificial
  Synthetically generated peptide
gcgctccgcgcctcagggca

SEQ ID NO: 4873 - DNA, 20 bp, Artificial
  Synthetically generated peptide
cgctccgcgcctcagggcac

SEQ ID NO: 4874 - DNA, 20 bp, Artificial
  Synthetically generated peptide
gctccgcgcctcagggcacg

SEQ ID NO: 4875 - DNA, 20 bp, Artificial
  Synthetically generated peptide
ctccgcgcctcagggcacgc

SEQ ID NO: 4876 - DNA, 20 bp, Artificial
  Synthetically generated peptide
tccgcgcctcagggcacgcg

SEQ ID NO: 4877 - DNA, 20 bp, Artificial
  Synthetically generated peptide
ccgcgcctcagggcacgcgc

SEQ ID NO: 4878 - DNA, 20 bp, Artificial
  Synthetically generated peptide
cgcgcctcagggcacgcgcc

SEQ ID NO: 4879 - DNA, 20 bp, Artificial
  Synthetically generated peptide
gcgcctcagggcacgcgccc

SEQ ID NO: 4880 - DNA, 20 bp, Artificial
  Synthetically generated peptide
cgcctcagggcacgcgcccc

SEQ ID NO: 4881 - DNA, 20 bp, Artificial
  Synthetically generated peptide
gcctcagggcacgcgcccca

SEQ ID NO: 4882 - DNA, 20 bp, Artificial
  Synthetically generated peptide
cctcagggcacgcgccccaa

SEQ ID NO: 4883 - DNA, 20 bp, Artificial
  Synthetically generated peptide
ctcagggcacgcgccccaaa

SEQ ID NO: 4884 - DNA, 20 bp, Artificial
  Synthetically generated peptide
tcagggcacgcgccccaaag

SEQ ID NO: 4885 - DNA, 20 bp, Artificial
  Synthetically generated peptide
cagggcacgcgccccaaagc

SEQ ID NO: 4886 - DNA, 20 bp, Artificial
  Synthetically generated peptide
agggcacgcgccccaaagcc

SEQ ID NO: 4887 - DNA, 20 bp, Artificial
  Synthetically generated peptide
gggcacgcgccccaaagccc

SEQ ID NO: 4888 - DNA, 20 bp, Artificial
  Synthetically generated peptide
ggcacgcgccccaaagcccg

SEQ ID NO: 4889 - DNA, 20 bp, Artificial
  Synthetically generated peptide
gcacgcgccccaaagcccgg

SEQ ID NO: 4890 - DNA, 20 bp, Artificial
  Synthetically generated peptide
cacgcgccccaaagcccggc

SEQ ID NO: 4891 - DNA, 20 bp, Artificial
  Synthetically generated peptide
acgcgccccaaagcccggcc

SEQ ID NO: 4892 - DNA, 20 bp, Artificial
  Synthetically generated peptide
cgcgccccaaagcccggcca

SEQ ID NO: 4893 - DNA, 20 bp, Artificial
  Synthetically generated peptide
gcgccccaaagcccggccag

SEQ ID NO: 4894 - DNA, 20 bp, Artificial
  Synthetically generated peptide
cgccccaaagcccggccagc

SEQ ID NO: 4895 - DNA, 20 bp, Artificial
  Synthetically generated peptide
gccccaaagcccggccagct

SEQ ID NO: 4896 - DNA, 20 bp, Artificial
  Synthetically generated peptide
ccccaaagcccggccagctg

SEQ ID NO: 4897 - DNA, 20 bp, Artificial
  Synthetically generated peptide
cccaaagcccggccagctga

SEQ ID NO: 4898 - DNA, 20 bp, Artificial
  Synthetically generated peptide
ccaaagcccggccagctgac

SEQ ID NO: 4899 - DNA, 20 bp, Artificial
  Synthetically generated peptide
caaagcccggccagctgacc

SEQ ID NO: 4900 - DNA, 20 bp, Artificial
  Synthetically generated peptide
aaagcccggccagctgaccc

SEQ ID NO: 4901 - DNA, 20 bp, Artificial
  Synthetically generated peptide
aagcccggccagctgaccct

SEQ ID NO: 4902 - DNA, 20 bp, Artificial
  Synthetically generated peptide
agcccggccagctgaccctt

SEQ ID NO: 4903 - DNA, 20 bp, Artificial
  Synthetically generated peptide
gcccggccagctgacccttt

SEQ ID NO: 4904 - DNA, 20 bp, Artificial
  Synthetically generated peptide
cccggccagctgaccctttt

SEQ ID NO: 4905 - DNA, 20 bp, Artificial
  Synthetically generated peptide
ccggccagctgacccttttc

SEQ ID NO: 4906 - DNA, 20 bp, Artificial
  Synthetically generated peptide
cggccagctgacccttttcg

SEQ ID NO: 4907 - DNA, 20 bp, Artificial
  Synthetically generated peptide
ggccagctgacccttttcgg

SEQ ID NO: 4908 - DNA, 20 bp, Artificial
  Synthetically generated peptide
gccagctgacccttttcggg

SEQ ID NO: 4909 - DNA, 20 bp, Artificial
  Synthetically generated peptide
ccagctgacccttttcgggg

SEQ ID NO: 4910 - DNA, 20 bp, Artificial
  Synthetically generated peptide
cagctgacccttttcggggc

SEQ ID NO: 4911 - DNA, 20 bp, Artificial
  Synthetically generated peptide
agctgacccttttcggggcc

SEQ ID NO: 4912 - DNA, 20 bp, Artificial
  Synthetically generated peptide
gctgacccttttcggggccc

SEQ ID NO: 4913 - DNA, 20 bp, Artificial
  Synthetically generated peptide
ctgacccttttcggggccca

SEQ ID NO: 4914 - DNA, 20 bp, Artificial
  Synthetically generated peptide
tgacccttttcggggcccaa

SEQ ID NO: 4915 - DNA, 20 bp, Artificial
  Synthetically generated peptide
gacccttttcggggcccaaa

SEQ ID NO: 4916 - DNA, 20 bp, Artificial
  Synthetically generated peptide
acccttttcggggcccaaaa

SEQ ID NO: 4917 - DNA, 20 bp, Artificial
  Synthetically generated peptide
cccttttcggggcccaaaaa

SEQ ID NO: 4918 - DNA, 20 bp, Artificial
  Synthetically generated peptide
ccttttcggggcccaaaaaa

SEQ ID NO: 4919 - DNA, 20 bp, Artificial
  Synthetically generated peptide
cttttcggggcccaaaaaag

SEQ ID NO: 4920 - DNA, 20 bp, Artificial
  Synthetically generated peptide
ttttcggggcccaaaaaagg

SEQ ID NO: 4921 - DNA, 20 bp, Artificial
  Synthetically generated peptide
tttcggggcccaaaaaaggc

SEQ ID NO: 4922 - DNA, 20 bp, Artificial
  Synthetically generated peptide
ttcggggcccaaaaaaggca

SEQ ID NO: 4923 - DNA, 20 bp, Artificial
  Synthetically generated peptide
acgcgctccgcgcctcaggg

SEQ ID NO: 4924 - DNA, 20 bp, Artificial
  Synthetically generated peptide
aacgcgctccgcgcctcagg

SEQ ID NO: 4925 - DNA, 20 bp, Artificial
  Synthetically generated peptide
aaacgcgctccgcgcctcag

SEQ ID NO: 4926 - DNA, 20 bp, Artificial
  Synthetically generated peptide
caaacgcgctccgcgcctca

SEQ ID NO: 4927 - DNA, 20 bp, Artificial
  Synthetically generated peptide
gcaaacgcgctccgcgcctc

SEQ ID NO: 4928 - DNA, 20 bp, Artificial
  Synthetically generated peptide
agcaaacgcgctccgcgcct

SEQ ID NO: 4929 - DNA, 20 bp, Artificial
  Synthetically generated peptide
tagcaaacgcgctccgcgcc

SEQ ID NO: 4930 - DNA, 20 bp, Artificial
  Synthetically generated peptide
gtagcaaacgcgctccgcgc

SEQ ID NO: 4931 - DNA, 20 bp, Artificial
  Synthetically generated peptide
cgtagcaaacgcgctccgcg

SEQ ID NO: 4932 - DNA, 20 bp, Artificial
  Synthetically generated peptide
tcgtagcaaacgcgctccgc

SEQ ID NO: 4933 - DNA, 20 bp, Artificial
  Synthetically generated peptide
atcgtagcaaacgcgctccg

SEQ ID NO: 4934 - DNA, 20 bp, Artificial
  Synthetically generated peptide
catcgtagcaaacgcgctcc

SEQ ID NO: 4935 - DNA, 20 bp, Artificial
  Synthetically generated peptide
gcatcgtagcaaacgcgctc

SEQ ID NO: 4936 - DNA, 20 bp, Artificial
  Synthetically generated peptide
cgcatcgtagcaaacgcgct

SEQ ID NO: 4937 - DNA, 20 bp, Artificial
  Synthetically generated peptide
ccgcatcgtagcaaacgcgc

SEQ ID NO: 4938 - DNA, 20 bp, Artificial
  Synthetically generated peptide
cccgcatcgtagcaaacgcg

SEQ ID NO: 4939 - DNA, 20 bp, Artificial
  Synthetically generated peptide
ccccgcatcgtagcaaacgc

SEQ ID NO: 4940 - DNA, 20 bp, Artificial
  Synthetically generated peptide
cccccgcatcgtagcaaacg

SEQ ID NO: 4941 - DNA, 20 bp, Artificial
  Synthetically generated peptide
gcccccgcatcgtagcaaac

SEQ ID NO: 4942 - DNA, 20 bp, Artificial
  Synthetically generated peptide
agcccccgcatcgtagcaaa

SEQ ID NO: 4943 - DNA, 20 bp, Artificial
  Synthetically generated peptide
cagcccccgcatcgtagcaa

SEQ ID NO: 4944 - DNA, 20 bp, Artificial
  Synthetically generated peptide
gcagcccccgcatcgtagca

SEQ ID NO: 4945 - DNA, 20 bp, Artificial
  Synthetically generated peptide
agcagcccccgcatcgtagc

SEQ ID NO: 4946 - DNA, 20 bp, Artificial
  Synthetically generated peptide
gagcagcccccgcatcgtag

SEQ ID NO: 4947 - DNA, 20 bp, Artificial
  Synthetically generated peptide
cgagcagcccccgcatcgta

SEQ ID NO: 4948 - DNA, 20 bp, Artificial
  Synthetically generated peptide
ccgagcagcccccgcatcgt

SEQ ID NO: 4949 - DNA, 20 bp, Artificial
  Synthetically generated peptide
cccgagcagcccccgcatcg

SEQ ID NO: 4950 - DNA, 20 bp, Artificial
  Synthetically generated peptide
ccccgagcagcccccgcatc

SEQ ID NO: 4951 - DNA, 20 bp, Artificial
  Synthetically generated peptide
gccccgagcagcccccgcat

SEQ ID NO: 4952 - DNA, 20 bp, Artificial
  Synthetically generated peptide
agccccgagcagcccccgca

SEQ ID NO: 4953 - DNA, 20 bp, Artificial
  Synthetically generated peptide
gagccccgagcagcccccgc

SEQ ID NO: 4954 - DNA, 20 bp, Artificial
  Synthetically generated peptide
ggagccccgagcagcccccg

SEQ ID NO: 4955 - DNA, 20 bp, Artificial
  Synthetically generated peptide
cggagccccgagcagccccc

SEQ ID NO: 4956 - DNA, 20 bp, Artificial
  Synthetically generated peptide
acggagccccgagcagcccc

SEQ ID NO: 4957 - DNA, 20 bp, Artificial
  Synthetically generated peptide
gacggagccccgagcagccc

SEQ ID NO: 4958 - DNA, 20 bp, Artificial
  Synthetically generated peptide
ggacggagccccgagcagcc

SEQ ID NO: 4959 - DNA, 20 bp, Artificial
  Synthetically generated peptide
gggacggagccccgagcagc

SEQ ID NO: 4960 - DNA, 22 bp, Artificial
  Synthetically generated peptide
agccgttcccgcctcacaatcg

SEQ ID NO: 4961 - DNA, 20 bp, Artificial
  Synthetically generated peptide
gccgttcccgcctcacaatc

SEQ ID NO: 4962 - DNA, 20 bp, Artificial
  Synthetically generated peptide
ccgttcccgcctcacaatcg

SEQ ID NO: 4963 - DNA, 20 bp, Artificial
  Synthetically generated peptide
cgttcccgcctcacaatcgt

SEQ ID NO: 4964 - DNA, 20 bp, Artificial
  Synthetically generated peptide
gttcccgcctcacaatcgtt

SEQ ID NO: 4965 - DNA, 20 bp, Artificial
  Synthetically generated peptide
ttcccgcctcacaatcgttt

SEQ ID NO: 4966 - DNA, 20 bp, Artificial
  Synthetically generated peptide
tcccgcctcacaatcgtttt

SEQ ID NO: 4967 - DNA, 20 bp, Artificial
  Synthetically generated peptide
cccgcctcacaatcgttttc

SEQ ID NO: 4968 - DNA, 20 bp, Artificial
  Synthetically generated peptide
ccgcctcacaatcgttttcc

SEQ ID NO: 4969 - DNA, 20 bp, Artificial
  Synthetically generated peptide
cgcctcacaatcgttttcct

SEQ ID NO: 4970 - DNA, 20 bp, Artificial
  Synthetically generated peptide
gcctcacaatcgttttcctc

SEQ ID NO: 4971 - DNA, 20 bp, Artificial
  Synthetically generated peptide
cctcacaatcgttttcctct

SEQ ID NO: 4972 - DNA, 20 bp, Artificial
  Synthetically generated peptide
aagccgttcccgcctcacaa

SEQ ID NO: 4973 - DNA, 20 bp, Artificial
  Synthetically generated peptide
aaagccgttcccgcctcaca

SEQ ID NO: 4974 - DNA, 20 bp, Artificial
  Synthetically generated peptide
gaaagccgttcccgcctcac

SEQ ID NO: 4975 - DNA, 20 bp, Artificial
  Synthetically generated peptide
agaaagccgttcccgcctca

SEQ ID NO: 4976 - DNA, 20 bp, Artificial
  Synthetically generated peptide
cagaaagccgttcccgcctc

SEQ ID NO: 4977 - DNA, 20 bp, Artificial
  Synthetically generated peptide
gcagaaagccgttcccgcct

SEQ ID NO: 4978 - DNA, 20 bp, Artificial
  Synthetically generated peptide
agcagaaagccgttcccgcc

SEQ ID NO: 4979 - DNA, 20 bp, Artificial
  Synthetically generated peptide
cagcagaaagccgttcccgc

SEQ ID NO: 4980 - DNA, 20 bp, Artificial
  Synthetically generated peptide
gcagcagaaagccgttcccg

SEQ ID NO: 4981 - DNA, 20 bp, Artificial
  Synthetically generated peptide
ggcagcagaaagccgttccc

SEQ ID NO: 4982 - DNA, 20 bp, Artificial
  Synthetically generated peptide
aggcagcagaaagccgttcc

SEQ ID NO: 4983 - DNA, 20 bp, Artificial
  Synthetically generated peptide
aaggcagcagaaagccgttc

SEQ ID NO: 4984 - DNA, 21 bp, Artificial
  Synthetically generated peptide
ccgccatctaagatggcggcc

SEQ ID NO: 4985 - DNA, 20 bp, Artificial
  Synthetically generated peptide
cgccatctaagatggcggcc

SEQ ID NO: 4986 - DNA, 20 bp, Artificial
  Synthetically generated peptide
gccatctaagatggcggccc

SEQ ID NO: 4987 - DNA, 20 bp, Artificial
  Synthetically generated peptide
ccatctaagatggcggccca

SEQ ID NO: 4988 - DNA, 20 bp, Artificial
  Synthetically generated peptide
catctaagatggcggcccaa

SEQ ID NO: 4989 - DNA, 20 bp, Artificial
  Synthetically generated peptide
atctaagatggcggcccaag

SEQ ID NO: 4990 - DNA, 20 bp, Artificial
  Synthetically generated peptide
tctaagatggcggcccaagc

SEQ ID NO: 4991 - DNA, 20 bp, Artificial
  Synthetically generated peptide
ctaagatggcggcccaagcg

SEQ ID NO: 4992 - DNA, 20 bp, Artificial
  Synthetically generated peptide
taagatggcggcccaagcgc

SEQ ID NO: 4993 - DNA, 20 bp, Artificial
  Synthetically generated peptide
aagatggcggcccaagcgcc

SEQ ID NO: 4994 - DNA, 20 bp, Artificial
  Synthetically generated peptide
agatggcggcccaagcgccc

SEQ ID NO: 4995 - DNA, 20 bp, Artificial
  Synthetically generated peptide
gatggcggcccaagcgcccg

SEQ ID NO: 4996 - DNA, 20 bp, Artificial
  Synthetically generated peptide
atggcggcccaagcgcccgc

SEQ ID NO: 4997 - DNA, 20 bp, Artificial
  Synthetically generated peptide
tggcggcccaagcgcccgcg

SEQ ID NO: 4998 - DNA, 20 bp, Artificial
  Synthetically generated peptide
ggcggcccaagcgcccgcga

SEQ ID NO: 4999 - DNA, 20 bp, Artificial
  Synthetically generated peptide
gcggcccaagcgcccgcgat

SEQ ID NO: 5000 - DNA, 20 bp, Artificial
  Synthetically generated peptide
cggcccaagcgcccgcgatt

SEQ ID NO: 5001 - DNA, 20 bp, Artificial
  Synthetically generated peptide
ggcccaagcgcccgcgatta

SEQ ID NO: 5002 - DNA, 20 bp, Artificial
  Synthetically generated peptide
gcccaagcgcccgcgattaa

SEQ ID NO: 5003 - DNA, 20 bp, Artificial
  Synthetically generated peptide
cccaagcgcccgcgattaag

SEQ ID NO: 5004 - DNA, 20 bp, Artificial
  Synthetically generated peptide
ccaagcgcccgcgattaaga

SEQ ID NO: 5005 - DNA, 20 bp, Artificial
  Synthetically generated peptide
caagcgcccgcgattaagac

SEQ ID NO: 5006 - DNA, 20 bp, Artificial
  Synthetically generated peptide
aagcgcccgcgattaagact

SEQ ID NO: 5007 - DNA, 20 bp, Artificial
  Synthetically generated peptide
agcgcccgcgattaagactc

SEQ ID NO: 5008 - DNA, 20 bp, Artificial
  Synthetically generated peptide
gcgcccgcgattaagactct

SEQ ID NO: 5009 - DNA, 20 bp, Artificial
  Synthetically generated peptide
cgcccgcgattaagactctc

SEQ ID NO: 5010 - DNA, 20 bp, Artificial
  Synthetically generated peptide
gcccgcgattaagactctcg

SEQ ID NO: 5011 - DNA, 20 bp, Artificial
  Synthetically generated peptide
cccgcgattaagactctcgg

SEQ ID NO: 5012 - DNA, 20 bp, Artificial
  Synthetically generated peptide
ccgcgattaagactctcggg

SEQ ID NO: 5013 - DNA, 20 bp, Artificial
  Synthetically generated peptide
cgcgattaagactctcgggc

SEQ ID NO: 5014 - DNA, 20 bp, Artificial
  Synthetically generated peptide
gcgattaagactctcgggcg

SEQ ID NO: 5015 - DNA, 20 bp, Artificial
  Synthetically generated peptide
cgattaagactctcgggcgg

SEQ ID NO: 5016 - DNA, 20 bp, Artificial
  Synthetically generated peptide
gattaagactctcgggcggc

SEQ ID NO: 5017 - DNA, 20 bp, Artificial
  Synthetically generated peptide
attaagactctcgggcggcc

SEQ ID NO: 5018 - DNA, 20 bp, Artificial
  Synthetically generated peptide
ttaagactctcgggcggccc

SEQ ID NO: 5019 - DNA, 20 bp, Artificial
  Synthetically generated peptide
taagactctcgggcggccca

SEQ ID NO: 5020 - DNA, 20 bp, Artificial
  Synthetically generated peptide
aagactctcgggcggcccag

SEQ ID NO: 5021 - DNA, 20 bp, Artificial
  Synthetically generated peptide
agactctcgggcggcccaga

SEQ ID NO: 5022 - DNA, 20 bp, Artificial
  Synthetically generated peptide
gactctcgggcggcccagac

SEQ ID NO: 5023 - DNA, 20 bp, Artificial
  Synthetically generated peptide
actctcgggcggcccagacg

SEQ ID NO: 5024 - DNA, 20 bp, Artificial
  Synthetically generated peptide
ctctcgggcggcccagacga

SEQ ID NO: 5025 - DNA, 20 bp, Artificial
  Synthetically generated peptide
tctcgggcggcccagacgag

SEQ ID NO: 5026 - DNA, 20 bp, Artificial
  Synthetically generated peptide
ctcgggcggcccagacgagc

SEQ ID NO: 5027 - DNA, 20 bp, Artificial
  Synthetically generated peptide
tcgggcggcccagacgagcg

SEQ ID NO: 5028 - DNA, 20 bp, Artificial
  Synthetically generated peptide
cgggcggcccagacgagcga

SEQ ID NO: 5029 - DNA, 20 bp, Artificial
  Synthetically generated peptide
cccgccatctaagatggcgg

SEQ ID NO: 5030 - DNA, 20 bp, Artificial
  Synthetically generated peptide
tcccgccatctaagatggcg

SEQ ID NO: 5031 - DNA, 20 bp, Artificial
  Synthetically generated peptide
ctcccgccatctaagatggc

SEQ ID NO: 5032 - DNA, 20 bp, Artificial
  Synthetically generated peptide
actcccgccatctaagatgg

SEQ ID NO: 5033 - DNA, 20 bp, Artificial
  Synthetically generated peptide
tactcccgccatctaagatg

SEQ ID NO: 5034 - DNA, 20 bp, Artificial
  Synthetically generated peptide
ttactcccgccatctaagat

SEQ ID NO: 5035 - DNA, 20 bp, Artificial
  Synthetically generated peptide
cttactcccgccatctaaga

SEQ ID NO: 5036 - DNA, 20 bp, Artificial
  Synthetically generated peptide
tcttactcccgccatctaag

SEQ ID NO: 5037 - DNA, 20 bp, Artificial
  Synthetically generated peptide
ctcttactcccgccatctaa

SEQ ID NO: 5038 - DNA, 20 bp, Artificial
  Synthetically generated peptide
cctcttactcccgccatcta

SEQ ID NO: 5039 - DNA, 20 bp, Artificial
  Synthetically generated peptide
tcctcttactcccgccatct

SEQ ID NO: 5040 - DNA, 20 bp, Artificial
  Synthetically generated peptide
ttcctcttactcccgccatc

SEQ ID NO: 5041 - DNA, 20 bp, Artificial
  Synthetically generated peptide
tttcctcttactcccgccat

SEQ ID NO: 5042 - DNA, 20 bp, Artificial
  Synthetically generated peptide
ttttcctcttactcccgcca

SEQ ID NO: 5043 - DNA, 20 bp, Artificial
  Synthetically generated peptide
gttttcctcttactcccgcc

SEQ ID NO: 5044 - DNA, 20 bp, Artificial
  Synthetically generated peptide
cgttttcctcttactcccgc

SEQ ID NO: 5045 - DNA, 20 bp, Artificial
  Synthetically generated peptide
tcgttttcctcttactcccg

SEQ ID NO: 5046 - DNA, 20 bp, Artificial
  Synthetically generated peptide
atcgttttcctcttactccc

SEQ ID NO: 5047 - DNA, 27 bp, Artificial
  Synthetically generated peptide
cgggcggcccagacgagcgagccctcg

SEQ ID NO: 5048 - DNA, 20 bp, Artificial
  Synthetically generated peptide
tcgggcggcccagacgagcg

SEQ ID NO: 5049 - DNA, 20 bp, Artificial
  Synthetically generated peptide
ctcgggcggcccagacgagc

SEQ ID NO: 5050 - DNA, 20 bp, Artificial
  Synthetically generated peptide
tctcgggcggcccagacgag

SEQ ID NO: 5051 - DNA, 20 bp, Artificial
  Synthetically generated peptide
ctctcgggcggcccagacga

SEQ ID NO: 5052 - DNA, 20 bp, Artificial
  Synthetically generated peptide
actctcgggcggcccagacg

SEQ ID NO: 5053 - DNA, 20 bp, Artificial
  Synthetically generated peptide
gactctcgggcggcccagac

SEQ ID NO: 5054 - DNA, 20 bp, Artificial
  Synthetically generated peptide
agactctcgggcggcccaga

SEQ ID NO: 5055 - DNA, 20 bp, Artificial
  Synthetically generated peptide
aagactctcgggcggcccag

SEQ ID NO: 5056 - DNA, 20 bp, Artificial
  Synthetically generated peptide
taagactctcgggcggccca

SEQ ID NO: 5057 - DNA, 20 bp, Artificial
  Synthetically generated peptide
ttaagactctcgggcggccc

SEQ ID NO: 5058 - DNA, 20 bp, Artificial
  Synthetically generated peptide
attaagactctcgggcggcc

SEQ ID NO: 5059 - DNA, 20 bp, Artificial
  Synthetically generated peptide
gattaagactctcgggcggc

SEQ ID NO: 5060 - DNA, 20 bp, Artificial
  Synthetically generated peptide
cgattaagactctcgggcgg

SEQ ID NO: 5061 - DNA, 20 bp, Artificial
  Synthetically generated peptide
gcgattaagactctcgggcg

SEQ ID NO: 5062 - DNA, 20 bp, Artificial
  Synthetically generated peptide
cgcgattaagactctcgggc

SEQ ID NO: 5063 - DNA, 20 bp, Artificial
  Synthetically generated peptide
ccgcgattaagactctcggg

SEQ ID NO: 5064 - DNA, 20 bp, Artificial
  Synthetically generated peptide
cccgcgattaagactctcgg

SEQ ID NO: 5065 - DNA, 20 bp, Artificial
  Synthetically generated peptide
gcccgcgattaagactctcg

SEQ ID NO: 5066 - DNA, 20 bp, Artificial
  Synthetically generated peptide
cgcccgcgattaagactctc

SEQ ID NO: 5067 - DNA, 20 bp, Artificial
  Synthetically generated peptide
gcgcccgcgattaagactct

SEQ ID NO: 5068 - DNA, 20 bp, Artificial
  Synthetically generated peptide
agcgcccgcgattaagactc

SEQ ID NO: 5069 - DNA, 20 bp, Artificial
  Synthetically generated peptide
aagcgcccgcgattaagact

SEQ ID NO: 5070 - DNA, 20 bp, Artificial
  Synthetically generated peptide
caagcgcccgcgattaagac

SEQ ID NO: 5071 - DNA, 20 bp, Artificial
  Synthetically generated peptide
ccaagcgcccgcgattaaga

SEQ ID NO: 5072 - DNA, 20 bp, Artificial
  Synthetically generated peptide
cccaagcgcccgcgattaag

SEQ ID NO: 5073 - DNA, 20 bp, Artificial
  Synthetically generated peptide
gcccaagcgcccgcgattaa

SEQ ID NO: 5074 - DNA, 20 bp, Artificial
  Synthetically generated peptide
ggcccaagcgcccgcgatta

SEQ ID NO: 5075 - DNA, 20 bp, Artificial
  Synthetically generated peptide
cggcccaagcgcccgcgatt

SEQ ID NO: 5076 - DNA, 20 bp, Artificial
  Synthetically generated peptide
gcggcccaagcgcccgcgat

SEQ ID NO: 5077 - DNA, 20 bp, Artificial
  Synthetically generated peptide
ggcggcccaagcgcccgcga

SEQ ID NO: 5078 - DNA, 20 bp, Artificial
  Synthetically generated peptide
tggcggcccaagcgcccgcg

SEQ ID NO: 5079 - DNA, 20 bp, Artificial
  Synthetically generated peptide
atggcggcccaagcgcccgc

SEQ ID NO: 5080 - DNA, 20 bp, Artificial
  Synthetically generated peptide
gatggcggcccaagcgcccg

SEQ ID NO: 5081 - DNA, 20 bp, Artificial
  Synthetically generated peptide
agatggcggcccaagcgccc

SEQ ID NO: 5082 - DNA, 20 bp, Artificial
  Synthetically generated peptide
aagatggcggcccaagcgcc

SEQ ID NO: 5083 - DNA, 20 bp, Artificial
  Synthetically generated peptide
taagatggcggcccaagcgc

SEQ ID NO: 5084 - DNA, 20 bp, Artificial
  Synthetically generated peptide
ctaagatggcggcccaagcg

SEQ ID NO: 5085 - DNA, 20 bp, Artificial
  Synthetically generated peptide
tctaagatggcggcccaagc

SEQ ID NO: 5086 - DNA, 20 bp, Artificial
  Synthetically generated peptide
atctaagatggcggcccaag

SEQ ID NO: 5087 - DNA, 20 bp, Artificial
  Synthetically generated peptide
catctaagatggcggcccaa

SEQ ID NO: 5088 - DNA, 20 bp, Artificial
  Synthetically generated peptide
ccatctaagatggcggccca

SEQ ID NO: 5089 - DNA, 20 bp, Artificial
  Synthetically generated peptide
gccatctaagatggcggccc

SEQ ID NO: 5090 - DNA, 20 bp, Artificial
  Synthetically generated peptide
cgccatctaagatggcggcc

SEQ ID NO: 5091 - DNA, 20 bp, Artificial
  Synthetically generated peptide
ccgccatctaagatggcggc

SEQ ID NO: 5092 - DNA, 20 bp, Artificial
  Synthetically generated peptide
cccgccatctaagatggcgg

SEQ ID NO: 5093 - DNA, 20 bp, Artificial
  Synthetically generated peptide
tcccgccatctaagatggcg

SEQ ID NO: 5094 - DNA, 20 bp, Artificial
  Synthetically generated peptide
ctcccgccatctaagatggc

SEQ ID NO: 5095 - DNA, 20 bp, Artificial
  Synthetically generated peptide
actcccgccatctaagatgg

SEQ ID NO: 5096 - DNA, 20 bp, Artificial
  Synthetically generated peptide
tactcccgccatctaagatg

SEQ ID NO: 5097 - DNA, 20 bp, Artificial
  Synthetically generated peptide
ttactcccgccatctaagat

SEQ ID NO: 5098 - DNA, 20 bp, Artificial
  Synthetically generated peptide
cttactcccgccatctaaga

SEQ ID NO: 5099 - DNA, 20 bp, Artificial
  Synthetically generated peptide
tcttactcccgccatctaag

SEQ ID NO: 5100 - DNA, 20 bp, Artificial
  Synthetically generated peptide
ctcttactcccgccatctaa

SEQ ID NO: 5101 - DNA, 20 bp, Artificial
  Synthetically generated peptide
cctcttactcccgccatcta

SEQ ID NO: 5102 - DNA, 20 bp, Artificial
  Synthetically generated peptide
tcctcttactcccgccatct

SEQ ID NO: 5103 - DNA, 20 bp, Artificial
  Synthetically generated peptide
ttcctcttactcccgccatc

SEQ ID NO: 5104 - DNA, 20 bp, Artificial
  Synthetically generated peptide
tttcctcttactcccgccat

SEQ ID NO: 5105 - DNA, 20 bp, Artificial
  Synthetically generated peptide
ttttcctcttactcccgcca

SEQ ID NO: 5106 - DNA, 20 bp, Artificial
  Synthetically generated peptide
gttttcctcttactcccgcc

SEQ ID NO: 5107 - DNA, 20 bp, Artificial
  Synthetically generated peptide
cgttttcctcttactcccgc

SEQ ID NO: 5108 - DNA, 20 bp, Artificial
  Synthetically generated peptide
tcgttttcctcttactcccg

SEQ ID NO: 5109 - DNA, 20 bp, Artificial
  Synthetically generated peptide
atcgttttcctcttactccc

SEQ ID NO: 5110 - DNA, 28 bp, Artificial
  Synthetically generated peptide
cgtcctcccgacctgcgacgccaccggc

SEQ ID NO: 5111 - DNA, 20 bp, Artificial
  Synthetically generated peptide
gtcctcccgacctgcgacgc

SEQ ID NO: 5112 - DNA, 20 bp, Artificial
  Synthetically generated peptide
tcctcccgacctgcgacgcc

SEQ ID NO: 5113 - DNA, 20 bp, Artificial
  Synthetically generated peptide
cctcccgacctgcgacgcca

SEQ ID NO: 5114 - DNA, 20 bp, Artificial
  Synthetically generated peptide
ctcccgacctgcgacgccac

SEQ ID NO: 5115 - DNA, 20 bp, Artificial
  Synthetically generated peptide
tcccgacctgcgacgccacc

SEQ ID NO: 5116 - DNA, 20 bp, Artificial
  Synthetically generated peptide
cccgacctgcgacgccaccg

SEQ ID NO: 5117 - DNA, 20 bp, Artificial
  Synthetically generated peptide
ccgacctgcgacgccaccgg

SEQ ID NO: 5118 - DNA, 20 bp, Artificial
  Synthetically generated peptide
cgacctgcgacgccaccggc

SEQ ID NO: 5119 - DNA, 20 bp, Artificial
  Synthetically generated peptide
gacctgcgacgccaccggct

SEQ ID NO: 5120 - DNA, 20 bp, Artificial
  Synthetically generated peptide
acctgcgacgccaccggctc

SEQ ID NO: 5121 - DNA, 20 bp, Artificial
  Synthetically generated peptide
cctgcgacgccaccggctct

SEQ ID NO: 5122 - DNA, 20 bp, Artificial
  Synthetically generated peptide
ctgcgacgccaccggctctc

SEQ ID NO: 5123 - DNA, 20 bp, Artificial
  Synthetically generated peptide
tgcgacgccaccggctctcc

SEQ ID NO: 5124 - DNA, 20 bp, Artificial
  Synthetically generated peptide
gcgacgccaccggctctccg

SEQ ID NO: 5125 - DNA, 20 bp, Artificial
  Synthetically generated peptide
cgacgccaccggctctccga

SEQ ID NO: 5126 - DNA, 20 bp, Artificial
  Synthetically generated peptide
gacgccaccggctctccgat

SEQ ID NO: 5127 - DNA, 20 bp, Artificial
  Synthetically generated peptide
acgccaccggctctccgatt

SEQ ID NO: 5128 - DNA, 20 bp, Artificial
  Synthetically generated peptide
cgccaccggctctccgattc

SEQ ID NO: 5129 - DNA, 20 bp, Artificial
  Synthetically generated peptide
gccaccggctctccgattct

SEQ ID NO: 5130 - DNA, 20 bp, Artificial
  Synthetically generated peptide
ccaccggctctccgattctg

SEQ ID NO: 5131 - DNA, 20 bp, Artificial
  Synthetically generated peptide
caccggctctccgattctgc

SEQ ID NO: 5132 - DNA, 20 bp, Artificial
  Synthetically generated peptide
accggctctccgattctgcg

SEQ ID NO: 5133 - DNA, 20 bp, Artificial
  Synthetically generated peptide
ccggctctccgattctgcgc

SEQ ID NO: 5134 - DNA, 20 bp, Artificial
  Synthetically generated peptide
cggctctccgattctgcgcg

SEQ ID NO: 5135 - DNA, 20 bp, Artificial
  Synthetically generated peptide
ggctctccgattctgcgcga

SEQ ID NO: 5136 - DNA, 20 bp, Artificial
  Synthetically generated peptide
gctctccgattctgcgcgag

SEQ ID NO: 5137 - DNA, 20 bp, Artificial
  Synthetically generated peptide
ctctccgattctgcgcgagc

SEQ ID NO: 5138 - DNA, 20 bp, Artificial
  Synthetically generated peptide
tctccgattctgcgcgagcc

SEQ ID NO: 5139 - DNA, 20 bp, Artificial
  Synthetically generated peptide
ctccgattctgcgcgagccc

SEQ ID NO: 5140 - DNA, 20 bp, Artificial
  Synthetically generated peptide
tccgattctgcgcgagccct

SEQ ID NO: 5141 - DNA, 20 bp, Artificial
  Synthetically generated peptide
ccgattctgcgcgagcccta

SEQ ID NO: 5142 - DNA, 20 bp, Artificial
  Synthetically generated peptide
cgattctgcgcgagccctac

SEQ ID NO: 5143 - DNA, 20 bp, Artificial
  Synthetically generated peptide
gattctgcgcgagccctact

SEQ ID NO: 5144 - DNA, 20 bp, Artificial
  Synthetically generated peptide
attctgcgcgagccctactg

SEQ ID NO: 5145 - DNA, 20 bp, Artificial
  Synthetically generated peptide
ttctgcgcgagccctactgg

SEQ ID NO: 5146 - DNA, 20 bp, Artificial
  Synthetically generated peptide
tctgcgcgagccctactggc

SEQ ID NO: 5147 - DNA, 20 bp, Artificial
  Synthetically generated peptide
ctgcgcgagccctactggca

SEQ ID NO: 5148 - DNA, 20 bp, Artificial
  Synthetically generated peptide
tgcgcgagccctactggcag

SEQ ID NO: 5149 - DNA, 20 bp, Artificial
  Synthetically generated peptide
gcgcgagccctactggcagt

SEQ ID NO: 5150 - DNA, 20 bp, Artificial
  Synthetically generated peptide
cgcgagccctactggcagtc

SEQ ID NO: 5151 - DNA, 20 bp, Artificial
  Synthetically generated peptide
gcgagccctactggcagtcg

SEQ ID NO: 5152 - DNA, 20 bp, Artificial
  Synthetically generated peptide
cgagccctactggcagtcga

SEQ ID NO: 5153 - DNA, 20 bp, Artificial
  Synthetically generated peptide
gagccctactggcagtcgac

SEQ ID NO: 5154 - DNA, 20 bp, Artificial
  Synthetically generated peptide
agccctactggcagtcgact

SEQ ID NO: 5155 - DNA, 20 bp, Artificial
  Synthetically generated peptide
gccctactggcagtcgactt

SEQ ID NO: 5156 - DNA, 20 bp, Artificial
  Synthetically generated peptide
ccctactggcagtcgacttc

SEQ ID NO: 5157 - DNA, 20 bp, Artificial
  Synthetically generated peptide
cctactggcagtcgacttct

SEQ ID NO: 5158 - DNA, 20 bp, Artificial
  Synthetically generated peptide
ctactggcagtcgacttcta

SEQ ID NO: 5159 - DNA, 20 bp, Artificial
  Synthetically generated peptide
tactggcagtcgacttctaa

SEQ ID NO: 5160 - DNA, 20 bp, Artificial
  Synthetically generated peptide
actggcagtcgacttctaac

SEQ ID NO: 5161 - DNA, 20 bp, Artificial
  Synthetically generated peptide
ctggcagtcgacttctaact

SEQ ID NO: 5162 - DNA, 20 bp, Artificial
  Synthetically generated peptide
tggcagtcgacttctaactt

SEQ ID NO: 5163 - DNA, 20 bp, Artificial
  Synthetically generated peptide
ggcagtcgacttctaacttg

SEQ ID NO: 5164 - DNA, 20 bp, Artificial
  Synthetically generated peptide
gcagtcgacttctaacttgg

SEQ ID NO: 5165 - DNA, 20 bp, Artificial
  Synthetically generated peptide
cagtcgacttctaacttggc

SEQ ID NO: 5166 - DNA, 20 bp, Artificial
  Synthetically generated peptide
agtcgacttctaacttggct

SEQ ID NO: 5167 - DNA, 20 bp, Artificial
  Synthetically generated peptide
gtcgacttctaacttggctc

SEQ ID NO: 5168 - DNA, 20 bp, Artificial
  Synthetically generated peptide
tcgacttctaacttggctcg

SEQ ID NO: 5169 - DNA, 20 bp, Artificial
  Synthetically generated peptide
cgacttctaacttggctcgg

SEQ ID NO: 5170 - DNA, 20 bp, Artificial
  Synthetically generated peptide
gacttctaacttggctcggg

SEQ ID NO: 5171 - DNA, 20 bp, Artificial
  Synthetically generated peptide
acttctaacttggctcgggc

SEQ ID NO: 5172 - DNA, 20 bp, Artificial
  Synthetically generated peptide
cttctaacttggctcgggca

SEQ ID NO: 5173 - DNA, 20 bp, Artificial
  Synthetically generated peptide
ttctaacttggctcgggcat

SEQ ID NO: 5174 - DNA, 20 bp, Artificial
  Synthetically generated peptide
tctaacttggctcgggcatc

SEQ ID NO: 5175 - DNA, 20 bp, Artificial
  Synthetically generated peptide
ctaacttggctcgggcatcc

SEQ ID NO: 5176 - DNA, 20 bp, Artificial
  Synthetically generated peptide
taacttggctcgggcatcca

SEQ ID NO: 5177 - DNA, 20 bp, Artificial
  Synthetically generated peptide
aacttggctcgggcatccat

SEQ ID NO: 5178 - DNA, 20 bp, Artificial
  Synthetically generated peptide
acttggctcgggcatccatc

SEQ ID NO: 5179 - DNA, 20 bp, Artificial
  Synthetically generated peptide
cttggctcgggcatccatcg

SEQ ID NO: 5180 - DNA, 20 bp, Artificial
  Synthetically generated peptide
ttggctcgggcatccatcgc

SEQ ID NO: 5181 - DNA, 20 bp, Artificial
  Synthetically generated peptide
tggctcgggcatccatcgct

SEQ ID NO: 5182 - DNA, 20 bp, Artificial
  Synthetically generated peptide
ggctcgggcatccatcgctc

SEQ ID NO: 5183 - DNA, 20 bp, Artificial
  Synthetically generated peptide
gctcgggcatccatcgctct

SEQ ID NO: 5184 - DNA, 20 bp, Artificial
  Synthetically generated peptide
ctcgggcatccatcgctctg

SEQ ID NO: 5185 - DNA, 20 bp, Artificial
  Synthetically generated peptide
tcgggcatccatcgctctgg

SEQ ID NO: 5186 - DNA, 20 bp, Artificial
  Synthetically generated peptide
cgggcatccatcgctctggc

SEQ ID NO: 5187 - DNA, 20 bp, Artificial
  Synthetically generated peptide
gggcatccatcgctctggcc

SEQ ID NO: 5188 - DNA, 20 bp, Artificial
  Synthetically generated peptide
ggcatccatcgctctggcct

SEQ ID NO: 5189 - DNA, 20 bp, Artificial
  Synthetically generated peptide
gcatccatcgctctggcctg

SEQ ID NO: 5190 - DNA, 20 bp, Artificial
  Synthetically generated peptide
catccatcgctctggcctga

SEQ ID NO: 5191 - DNA, 20 bp, Artificial
  Synthetically generated peptide
atccatcgctctggcctgaa

SEQ ID NO: 5192 - DNA, 20 bp, Artificial
  Synthetically generated peptide
tccatcgctctggcctgaac

SEQ ID NO: 5193 - DNA, 20 bp, Artificial
  Synthetically generated peptide
ccatcgctctggcctgaact

SEQ ID NO: 5194 - DNA, 20 bp, Artificial
  Synthetically generated peptide
catcgctctggcctgaactc

SEQ ID NO: 5195 - DNA, 20 bp, Artificial
  Synthetically generated peptide
atcgctctggcctgaactca

SEQ ID NO: 5196 - DNA, 20 bp, Artificial
  Synthetically generated peptide
tcgctctggcctgaactcag

SEQ ID NO: 5197 - DNA, 20 bp, Artificial
  Synthetically generated peptide
cgctctggcctgaactcagg

SEQ ID NO: 5198 - DNA, 20 bp, Artificial
  Synthetically generated peptide
tcgtcctcccgacctgcgac

SEQ ID NO: 5199 - DNA, 20 bp, Artificial
  Synthetically generated peptide
ctcgtcctcccgacctgcga

SEQ ID NO: 5200 - DNA, 20 bp, Artificial
  Synthetically generated peptide
gctcgtcctcccgacctgcg

SEQ ID NO: 5201 - DNA, 20 bp, Artificial
  Synthetically generated peptide
tgctcgtcctcccgacctgc

SEQ ID NO: 5202 - DNA, 20 bp, Artificial
  Synthetically generated peptide
gtgctcgtcctcccgacctg

SEQ ID NO: 5203 - DNA, 20 bp, Artificial
  Synthetically generated peptide
ggtgctcgtcctcccgacct

SEQ ID NO: 5204 - DNA, 20 bp, Artificial
  Synthetically generated peptide
cggtgctcgtcctcccgacc

SEQ ID NO: 5205 - DNA, 20 bp, Artificial
  Synthetically generated peptide
tcggtgctcgtcctcccgac

SEQ ID NO: 5206 - DNA, 20 bp, Artificial
  Synthetically generated peptide
ctcggtgctcgtcctcccga

SEQ ID NO: 5207 - DNA, 20 bp, Artificial
  Synthetically generated peptide
actcggtgctcgtcctcccg

SEQ ID NO: 5208 - DNA, 20 bp, Artificial
  Synthetically generated peptide
gactcggtgctcgtcctccc

SEQ ID NO: 5209 - DNA, 20 bp, Artificial
  Synthetically generated peptide
cgactcggtgctcgtcctcc

SEQ ID NO: 5210 - DNA, 20 bp, Artificial
  Synthetically generated peptide
tcgactcggtgctcgtcctc

SEQ ID NO: 5211 - DNA, 20 bp, Artificial
  Synthetically generated peptide
ctcgactcggtgctcgtcct

SEQ ID NO: 5212 - DNA, 20 bp, Artificial
  Synthetically generated peptide
cctcgactcggtgctcgtcc

SEQ ID NO: 5213 - DNA, 20 bp, Artificial
  Synthetically generated peptide
ccctcgactcggtgctcgtc

SEQ ID NO: 5214 - DNA, 20 bp, Artificial
  Synthetically generated peptide
gccctcgactcggtgctcgt

SEQ ID NO: 5215 - DNA, 20 bp, Artificial
  Synthetically generated peptide
agccctcgactcggtgctcg

SEQ ID NO: 5216 - DNA, 20 bp, Artificial
  Synthetically generated peptide
gagccctcgactcggtgctc

SEQ ID NO: 5217 - DNA, 20 bp, Artificial
  Synthetically generated peptide
cgagccctcgactcggtgct

SEQ ID NO: 5218 - DNA, 20 bp, Artificial
  Synthetically generated peptide
gcgagccctcgactcggtgc

SEQ ID NO: 5219 - DNA, 20 bp, Artificial
  Synthetically generated peptide
agcgagccctcgactcggtg

SEQ ID NO: 5220 - DNA, 20 bp, Artificial
  Synthetically generated peptide
gagcgagccctcgactcggt

SEQ ID NO: 5221 - DNA, 20 bp, Artificial
  Synthetically generated peptide
cgagcgagccctcgactcgg

SEQ ID NO: 5222 - DNA, 20 bp, Artificial
  Synthetically generated peptide
acgagcgagccctcgactcg

SEQ ID NO: 5223 - DNA, 20 bp, Artificial
  Synthetically generated peptide
gacgagcgagccctcgactc

SEQ ID NO: 5224 - DNA, 20 bp, Artificial
  Synthetically generated peptide
agacgagcgagccctcgact

SEQ ID NO: 5225 - DNA, 20 bp, Artificial
  Synthetically generated peptide
cagacgagcgagccctcgac

SEQ ID NO: 5226 - DNA, 20 bp, Artificial
  Synthetically generated peptide
ccagacgagcgagccctcga

SEQ ID NO: 5227 - DNA, 20 bp, Artificial
  Synthetically generated peptide
cccagacgagcgagccctcg

SEQ ID NO: 5228 - DNA, 20 bp, Artificial
  Synthetically generated peptide
gcccagacgagcgagccctc

SEQ ID NO: 5229 - DNA, 20 bp, Artificial
  Synthetically generated peptide
ggcccagacgagcgagccct

SEQ ID NO: 5230 - DNA, 20 bp, Artificial
  Synthetically generated peptide
cggcccagacgagcgagccc

SEQ ID NO: 5231 - DNA, 20 bp, Artificial
  Synthetically generated peptide
gcggcccagacgagcgagcc

SEQ ID NO: 5232 - DNA, 20 bp, Artificial
  Synthetically generated peptide
ggcggcccagacgagcgagc

SEQ ID NO: 5233 - DNA, 25 bp, Artificial
  Synthetically generated peptide
cgcatattactgggtaaactctgtg

SEQ ID NO: 5234 - DNA, 24 bp, Artificial
  Synthetically generated peptide
cacgctggattttcaaaacagttg

SEQ ID NO: 5235 - DNA, 24 bp, Artificial
  Synthetically generated peptide
cagggcgcgtgaaggggcgcgcgg

SEQ ID NO: 5236 - DNA, 23 bp, Artificial
  Synthetically generated peptide
gacgcgtcccggcccgcccgagc

SEQ ID NO: 5237 - DNA, 20 bp, Artificial
  Synthetically generated peptide
acgcgtcccggcccgcccga

SEQ ID NO: 5238 - DNA, 20 bp, Artificial
  Synthetically generated peptide
cgcgtcccggcccgcccgag

SEQ ID NO: 5239 - DNA, 20 bp, Artificial
  Synthetically generated peptide
gcgtcccggcccgcccgagc

SEQ ID NO: 5240 - DNA, 20 bp, Artificial
  Synthetically generated peptide
cgtcccggcccgcccgagcc

SEQ ID NO: 5241 - DNA, 20 bp, Artificial
  Synthetically generated peptide
gtcccggcccgcccgagcca

SEQ ID NO: 5242 - DNA, 20 bp, Artificial
  Synthetically generated peptide
tcccggcccgcccgagccag

SEQ ID NO: 5243 - DNA, 20 bp, Artificial
  Synthetically generated peptide
cccggcccgcccgagccagt

SEQ ID NO: 5244 - DNA, 20 bp, Artificial
  Synthetically generated peptide
ccggcccgcccgagccagtc

SEQ ID NO: 5245 - DNA, 20 bp, Artificial
  Synthetically generated peptide
cggcccgcccgagccagtct

SEQ ID NO: 5246 - DNA, 20 bp, Artificial
  Synthetically generated peptide
ggcccgcccgagccagtctc

SEQ ID NO: 5247 - DNA, 20 bp, Artificial
  Synthetically generated peptide
gcccgcccgagccagtctca

SEQ ID NO: 5248 - DNA, 20 bp, Artificial
  Synthetically generated peptide
cccgcccgagccagtctcac

SEQ ID NO: 5249 - DNA, 20 bp, Artificial
  Synthetically generated peptide
ccgcccgagccagtctcact

SEQ ID NO: 5250 - DNA, 20 bp, Artificial
  Synthetically generated peptide
cgcccgagccagtctcactg

SEQ ID NO: 5251 - DNA, 20 bp, Artificial
  Synthetically generated peptide
gcccgagccagtctcactgc

SEQ ID NO: 5252 - DNA, 20 bp, Artificial
  Synthetically generated peptide
cccgagccagtctcactgcc

SEQ ID NO: 5253 - DNA, 20 bp, Artificial
  Synthetically generated peptide
ccgagccagtctcactgcct

SEQ ID NO: 5254 - DNA, 20 bp, Artificial
  Synthetically generated peptide
cgagccagtctcactgcctg

SEQ ID NO: 5255 - DNA, 20 bp, Artificial
  Synthetically generated peptide
cgacgcgtcccggcccgccc

SEQ ID NO: 5256 - DNA, 20 bp, Artificial
  Synthetically generated peptide
acgacgcgtcccggcccgcc

SEQ ID NO: 5257 - DNA, 20 bp, Artificial
  Synthetically generated peptide
aacgacgcgtcccggcccgc

SEQ ID NO: 5258 - DNA, 20 bp, Artificial
  Synthetically generated peptide
caacgacgcgtcccggcccg

SEQ ID NO: 5259 - DNA, 20 bp, Artificial
  Synthetically generated peptide
gcaacgacgcgtcccggccc

SEQ ID NO: 5260 - DNA, 20 bp, Artificial
  Synthetically generated peptide
tgcaacgacgcgtcccggcc

SEQ ID NO: 5261 - DNA, 20 bp, Artificial
  Synthetically generated peptide
ctgcaacgacgcgtcccggc

SEQ ID NO: 5262 - DNA, 20 bp, Artificial
  Synthetically generated peptide
gctgcaacgacgcgtcccgg

SEQ ID NO: 5263 - DNA, 20 bp, Artificial
  Synthetically generated peptide
tgctgcaacgacgcgtcccg

SEQ ID NO: 5264 - DNA, 20 bp, Artificial
  Synthetically generated peptide
ctgctgcaacgacgcgtccc

SEQ ID NO: 5265 - DNA, 20 bp, Artificial
  Synthetically generated peptide
gctgctgcaacgacgcgtcc

SEQ ID NO: 5266 - DNA, 20 bp, Artificial
  Synthetically generated peptide
cgctgctgcaacgacgcgtc

SEQ ID NO: 5267 - DNA, 20 bp, Artificial
  Synthetically generated peptide
ccgctgctgcaacgacgcgt

SEQ ID NO: 5268 - DNA, 20 bp, Artificial
  Synthetically generated peptide
gccgctgctgcaacgacgcg

SEQ ID NO: 5269 - DNA, 20 bp, Artificial
  Synthetically generated peptide
agccgctgctgcaacgacgc

SEQ ID NO: 5270 - DNA, 20 bp, Artificial
  Synthetically generated peptide
gagccgctgctgcaacgacg

SEQ ID NO: 5271 - DNA, 20 bp, Artificial
  Synthetically generated peptide
ggagccgctgctgcaacgac

SEQ ID NO: 5272 - DNA, 20 bp, Artificial
  Synthetically generated peptide
gggagccgctgctgcaacga

SEQ ID NO: 5273 - DNA, 20 bp, Artificial
  Synthetically generated peptide
tgggagccgctgctgcaacg

SEQ ID NO: 5274 - DNA, 20 bp, Artificial
  Synthetically generated peptide
ctgggagccgctgctgcaac

SEQ ID NO: 5275 - DNA, 20 bp, Artificial
  Synthetically generated peptide
gctgggagccgctgctgcaa

SEQ ID NO: 5276 - DNA, 20 bp, Artificial
  Synthetically generated peptide
agctgggagccgctgctgca

SEQ ID NO: 5277 - DNA, 20 bp, Artificial
  Synthetically generated peptide
gagctgggagccgctgctgc

SEQ ID NO: 5278 - DNA, 20 bp, Artificial
  Synthetically generated peptide
ggagctgggagccgctgctg

SEQ ID NO: 5279 - DNA, 20 bp, Artificial
  Synthetically generated peptide
gggagctgggagccgctgct

SEQ ID NO: 5280 - DNA, 20 bp, Artificial
  Synthetically generated peptide
tgggagctgggagccgctgc

SEQ ID NO: 5281 - DNA, 20 bp, Artificial
  Synthetically generated peptide
ctgggagctgggagccgctg

SEQ ID NO: 5282 - DNA, 20 bp, Artificial
  Synthetically generated peptide
gctgggagctgggagccgct

SEQ ID NO: 5283 - DNA, 20 bp, Artificial
  Synthetically generated peptide
ggctgggagctgggagccgc

SEQ ID NO: 5284 - DNA, 20 bp, Artificial
  Synthetically generated peptide
tggctgggagctgggagccg

SEQ ID NO: 5285 - DNA, 23 bp, Artificial
  Synthetically generated peptide
gacgcctggggcgcgcagatcac

SEQ ID NO: 5286 - DNA, 20 bp, Artificial
  Synthetically generated peptide
acgcctggggcgcgcagatc

SEQ ID NO: 5287 - DNA, 20 bp, Artificial
  Synthetically generated peptide
cgcctggggcgcgcagatca

SEQ ID NO: 5288 - DNA, 20 bp, Artificial
  Synthetically generated peptide
gcctggggcgcgcagatcac

SEQ ID NO: 5289 - DNA, 20 bp, Artificial
  Synthetically generated peptide
cctggggcgcgcagatcacg

SEQ ID NO: 5290 - DNA, 20 bp, Artificial
  Synthetically generated peptide
ctggggcgcgcagatcacgc

SEQ ID NO: 5291 - DNA, 20 bp, Artificial
  Synthetically generated peptide
tggggcgcgcagatcacgcc

SEQ ID NO: 5292 - DNA, 20 bp, Artificial
  Synthetically generated peptide
ggggcgcgcagatcacgcca

SEQ ID NO: 5293 - DNA, 20 bp, Artificial
  Synthetically generated peptide
gggcgcgcagatcacgccac

SEQ ID NO: 5294 - DNA, 20 bp, Artificial
  Synthetically generated peptide
ggcgcgcagatcacgccacc

SEQ ID NO: 5295 - DNA, 20 bp, Artificial
  Synthetically generated peptide
gcgcgcagatcacgccacca

SEQ ID NO: 5296 - DNA, 20 bp, Artificial
  Synthetically generated peptide
cgcgcagatcacgccaccag

SEQ ID NO: 5297 - DNA, 20 bp, Artificial
  Synthetically generated peptide
gcgcagatcacgccaccaga

SEQ ID NO: 5298 - DNA, 20 bp, Artificial
  Synthetically generated peptide
cgcagatcacgccaccagag

SEQ ID NO: 5299 - DNA, 20 bp, Artificial
  Synthetically generated peptide
gcagatcacgccaccagagc

SEQ ID NO: 5300 - DNA, 20 bp, Artificial
  Synthetically generated peptide
cagatcacgccaccagagcc

SEQ ID NO: 5301 - DNA, 20 bp, Artificial
  Synthetically generated peptide
agatcacgccaccagagccc

SEQ ID NO: 5302 - DNA, 20 bp, Artificial
  Synthetically generated peptide
gatcacgccaccagagcccc

SEQ ID NO: 5303 - DNA, 20 bp, Artificial
  Synthetically generated peptide
atcacgccaccagagcccca

SEQ ID NO: 5304 - DNA, 20 bp, Artificial
  Synthetically generated peptide
tcacgccaccagagccccat

SEQ ID NO: 5305 - DNA, 20 bp, Artificial
  Synthetically generated peptide
cacgccaccagagccccatc

SEQ ID NO: 5306 - DNA, 20 bp, Artificial
  Synthetically generated peptide
acgccaccagagccccatcg

SEQ ID NO: 5307 - DNA, 20 bp, Artificial
  Synthetically generated peptide
cgccaccagagccccatcgg

SEQ ID NO: 5308 - DNA, 20 bp, Artificial
  Synthetically generated peptide
gccaccagagccccatcgga

SEQ ID NO: 5309 - DNA, 20 bp, Artificial
  Synthetically generated peptide
ccaccagagccccatcggac

SEQ ID NO: 5310 - DNA, 20 bp, Artificial
  Synthetically generated peptide
caccagagccccatcggacg

SEQ ID NO: 5311 - DNA, 20 bp, Artificial
  Synthetically generated peptide
accagagccccatcggacga

SEQ ID NO: 5312 - DNA, 20 bp, Artificial
  Synthetically generated peptide
ccagagccccatcggacgat

SEQ ID NO: 5313 - DNA, 20 bp, Artificial
  Synthetically generated peptide
cagagccccatcggacgatc

SEQ ID NO: 5314 - DNA, 20 bp, Artificial
  Synthetically generated peptide
agagccccatcggacgatcc

SEQ ID NO: 5315 - DNA, 20 bp, Artificial
  Synthetically generated peptide
gagccccatcggacgatcct

SEQ ID NO: 5316 - DNA, 20 bp, Artificial
  Synthetically generated peptide
agccccatcggacgatccta

SEQ ID NO: 5317 - DNA, 20 bp, Artificial
  Synthetically generated peptide
gccccatcggacgatcctat

SEQ ID NO: 5318 - DNA, 20 bp, Artificial
  Synthetically generated peptide
ccccatcggacgatcctatc

SEQ ID NO: 5319 - DNA, 20 bp, Artificial
  Synthetically generated peptide
cccatcggacgatcctatct

SEQ ID NO: 5320 - DNA, 20 bp, Artificial
  Synthetically generated peptide
ccatcggacgatcctatctg

SEQ ID NO: 5321 - DNA, 20 bp, Artificial
  Synthetically generated peptide
catcggacgatcctatctga

SEQ ID NO: 5322 - DNA, 20 bp, Artificial
  Synthetically generated peptide
atcggacgatcctatctgat

SEQ ID NO: 5323 - DNA, 20 bp, Artificial
  Synthetically generated peptide
tcggacgatcctatctgatt

SEQ ID NO: 5324 - DNA, 20 bp, Artificial
  Synthetically generated peptide
cggacgatcctatctgatta

SEQ ID NO: 5325 - DNA, 20 bp, Artificial
  Synthetically generated peptide
tgacgcctggggcgcgcaga

SEQ ID NO: 5326 - DNA, 20 bp, Artificial
  Synthetically generated peptide
ttgacgcctggggcgcgcag

SEQ ID NO: 5327 - DNA, 20 bp, Artificial
  Synthetically generated peptide
cttgacgcctggggcgcgca

SEQ ID NO: 5328 - DNA, 20 bp, Artificial
  Synthetically generated peptide
gcttgacgcctggggcgcgc

SEQ ID NO: 5329 - DNA, 20 bp, Artificial
  Synthetically generated peptide
tgcttgacgcctggggcgcg

SEQ ID NO: 5330 - DNA, 20 bp, Artificial
  Synthetically generated peptide
gtgcttgacgcctggggcgc

SEQ ID NO: 5331 - DNA, 20 bp, Artificial
  Synthetically generated peptide
ggtgcttgacgcctggggcg

SEQ ID NO: 5332 - DNA, 20 bp, Artificial
  Synthetically generated peptide
gggtgcttgacgcctggggc

SEQ ID NO: 5333 - DNA, 20 bp, Artificial
  Synthetically generated peptide
tgggtgcttgacgcctgggg

SEQ ID NO: 5334 - DNA, 20 bp, Artificial
  Synthetically generated peptide
gtgggtgcttgacgcctggg

SEQ ID NO: 5335 - DNA, 20 bp, Artificial
  Synthetically generated peptide
tgtgggtgcttgacgcctgg

SEQ ID NO: 5336 - DNA, 20 bp, Artificial
  Synthetically generated peptide
gtgtgggtgcttgacgcctg

SEQ ID NO: 5337 - DNA, 20 bp, Artificial
  Synthetically generated peptide
ggtgtgggtgcttgacgcct

SEQ ID NO: 5338 - DNA, 20 bp, Artificial
  Synthetically generated peptide
gggtgtgggtgcttgacgcc

SEQ ID NO: 5339 - DNA, 20 bp, Artificial
  Synthetically generated peptide
agggtgtgggtgcttgacgc

SEQ ID NO: 5340 - DNA, 20 bp, Artificial
  Synthetically generated peptide
tagggtgtgggtgcttgacg

SEQ ID NO: 5341 - DNA, 23 bp, Artificial
  Synthetically generated peptide
caggccggcgccctaggggctcc

SEQ ID NO: 5342 - DNA, 20 bp, Artificial
  Synthetically generated peptide
aggccggcgccctaggggct

SEQ ID NO: 5343 - DNA, 20 bp, Artificial
  Synthetically generated peptide
ggccggcgccctaggggctc

SEQ ID NO: 5344 - DNA, 20 bp, Artificial
  Synthetically generated peptide
gccggcgccctaggggctcc

SEQ ID NO: 5345 - DNA, 20 bp, Artificial
  Synthetically generated peptide
ccggcgccctaggggctcct

SEQ ID NO: 5346 - DNA, 20 bp, Artificial
  Synthetically generated peptide
cggcgccctaggggctcctc

SEQ ID NO: 5347 - DNA, 20 bp, Artificial
  Synthetically generated peptide
ggcgccctaggggctcctcc

SEQ ID NO: 5348 - DNA, 20 bp, Artificial
  Synthetically generated peptide
gcgccctaggggctcctcct

SEQ ID NO: 5349 - DNA, 20 bp, Artificial
  Synthetically generated peptide
cgccctaggggctcctcctc

SEQ ID NO: 5350 - DNA, 20 bp, Artificial
  Synthetically generated peptide
gcaggccggcgccctagggg

SEQ ID NO: 5351 - DNA, 20 bp, Artificial
  Synthetically generated peptide
ggcaggccggcgccctaggg

SEQ ID NO: 5352 - DNA, 20 bp, Artificial
  Synthetically generated peptide
aggcaggccggcgccctagg

SEQ ID NO: 5353 - DNA, 20 bp, Artificial
  Synthetically generated peptide
aaggcaggccggcgccctag

SEQ ID NO: 5354 - DNA, 20 bp, Artificial
  Synthetically generated peptide
gaaggcaggccggcgcccta

SEQ ID NO: 5355 - DNA, 20 bp, Artificial
  Synthetically generated peptide
ggaaggcaggccggcgccct

SEQ ID NO: 5356 - DNA, 20 bp, Artificial
  Synthetically generated peptide
tggaaggcaggccggcgccc

SEQ ID NO: 5357 - DNA, 20 bp, Artificial
  Synthetically generated peptide
ctggaaggcaggccggcgcc

SEQ ID NO: 5358 - DNA, 20 bp, Artificial
  Synthetically generated peptide
gctggaaggcaggccggcgc

SEQ ID NO: 5359 - DNA, 22 bp, Artificial
  Synthetically generated peptide
cacgccggcggcgccttgagcc

SEQ ID NO: 5360 - DNA, 20 bp, Artificial
  Synthetically generated peptide
acgccggcggcgccttgagc

SEQ ID NO: 5361 - DNA, 20 bp, Artificial
  Synthetically generated peptide
cgccggcggcgccttgagcc

SEQ ID NO: 5362 - DNA, 20 bp, Artificial
  Synthetically generated peptide
gccggcggcgccttgagcct

SEQ ID NO: 5363 - DNA, 20 bp, Artificial
  Synthetically generated peptide
ccggcggcgccttgagcctt

SEQ ID NO: 5364 - DNA, 20 bp, Artificial
  Synthetically generated peptide
cggcggcgccttgagccttg

SEQ ID NO: 5365 - DNA, 20 bp, Artificial
  Synthetically generated peptide
ggcggcgccttgagccttgc

SEQ ID NO: 5366 - DNA, 20 bp, Artificial
  Synthetically generated peptide
gcggcgccttgagccttgcg

SEQ ID NO: 5367 - DNA, 20 bp, Artificial
  Synthetically generated peptide
cggcgccttgagccttgcgg

SEQ ID NO: 5368 - DNA, 20 bp, Artificial
  Synthetically generated peptide
ggcgccttgagccttgcggt

SEQ ID NO: 5369 - DNA, 20 bp, Artificial
  Synthetically generated peptide
gcgccttgagccttgcggtg

SEQ ID NO: 5370 - DNA, 20 bp, Artificial
  Synthetically generated peptide
cgccttgagccttgcggtgg

SEQ ID NO: 5371 - DNA, 20 bp, Artificial
  Synthetically generated peptide
gccttgagccttgcggtggg

SEQ ID NO: 5372 - DNA, 20 bp, Artificial
  Synthetically generated peptide
ccttgagccttgcggtgggg

SEQ ID NO: 5373 - DNA, 20 bp, Artificial
  Synthetically generated peptide
cttgagccttgcggtgggga

SEQ ID NO: 5374 - DNA, 20 bp, Artificial
  Synthetically generated peptide
ttgagccttgcggtggggag

SEQ ID NO: 5375 - DNA, 20 bp, Artificial
  Synthetically generated peptide
tgagccttgcggtggggagg

SEQ ID NO: 5376 - DNA, 20 bp, Artificial
  Synthetically generated peptide
ccacgccggcggcgccttga

SEQ ID NO: 5377 - DNA, 20 bp, Artificial
  Synthetically generated peptide
tccacgccggcggcgccttg

SEQ ID NO: 5378 - DNA, 20 bp, Artificial
  Synthetically generated peptide
gtccacgccggcggcgcctt

SEQ ID NO: 5379 - DNA, 20 bp, Artificial
  Synthetically generated peptide
ggtccacgccggcggcgcct

SEQ ID NO: 5380 - DNA, 20 bp, Artificial
  Synthetically generated peptide
cggtccacgccggcggcgcc

SEQ ID NO: 5381 - DNA, 20 bp, Artificial
  Synthetically generated peptide
gcggtccacgccggcggcgc

SEQ ID NO: 5382 - DNA, 20 bp, Artificial
  Synthetically generated peptide
cgcggtccacgccggcggcg

SEQ ID NO: 5383 - DNA, 20 bp, Artificial
  Synthetically generated peptide
gcgcggtccacgccggcggc

SEQ ID NO: 5384 - DNA, 20 bp, Artificial
  Synthetically generated peptide
tgcgcggtccacgccggcgg

SEQ ID NO: 5385 - DNA, 20 bp, Artificial
  Synthetically generated peptide
gtgcgcggtccacgccggcg

SEQ ID NO: 5386 - DNA, 20 bp, Artificial
  Synthetically generated peptide
cgtgcgcggtccacgccggc

SEQ ID NO: 5387 - DNA, 20 bp, Artificial
  Synthetically generated peptide
ccgtgcgcggtccacgccgg

SEQ ID NO: 5388 - DNA, 20 bp, Artificial
  Synthetically generated peptide
gccgtgcgcggtccacgccg

SEQ ID NO: 5389 - DNA, 20 bp, Artificial
  Synthetically generated peptide
ggccgtgcgcggtccacgcc

SEQ ID NO: 5390 - DNA, 20 bp, Artificial
  Synthetically generated peptide
aggccgtgcgcggtccacgc

SEQ ID NO: 5391 - DNA, 20 bp, Artificial
  Synthetically generated peptide
gaggccgtgcgcggtccacg

SEQ ID NO: 5392 - DNA, 20 bp, Artificial
  Synthetically generated peptide
agaggccgtgcgcggtccac

SEQ ID NO: 5393 - DNA, 20 bp, Artificial
  Synthetically generated peptide
tagaggccgtgcgcggtcca

SEQ ID NO: 5394 - DNA, 20 bp, Artificial
  Synthetically generated peptide
ctagaggccgtgcgcggtcc

SEQ ID NO: 5395 - DNA, 20 bp, Artificial
  Synthetically generated peptide
cctagaggccgtgcgcggtc

SEQ ID NO: 5396 - DNA, 20 bp, Artificial
  Synthetically generated peptide
acctagaggccgtgcgcggt

SEQ ID NO: 5397 - DNA, 20 bp, Artificial
  Synthetically generated peptide
gacctagaggccgtgcgcgg

SEQ ID NO: 5398 - DNA, 20 bp, Artificial
  Synthetically generated peptide
agacctagaggccgtgcgcg

SEQ ID NO: 5399 - DNA, 20 bp, Artificial
  Synthetically generated peptide
gagacctagaggccgtgcgc

SEQ ID NO: 5400 - DNA, 20 bp, Artificial
  Synthetically generated peptide
ggagacctagaggccgtgcg

SEQ ID NO: 5401 - DNA, 20 bp, Artificial
  Synthetically generated peptide
aggagacctagaggccgtgc

SEQ ID NO: 5402 - DNA, 22 bp, Artificial
  Synthetically generated peptide
caggtttcggcctcgccctccc

SEQ ID NO: 5403 - DNA, 20 bp, Artificial
  Synthetically generated peptide
aggtttcggcctcgccctcc

SEQ ID NO: 5404 - DNA, 20 bp, Artificial
  Synthetically generated peptide
ggtttcggcctcgccctccc

SEQ ID NO: 5405 - DNA, 20 bp, Artificial
  Synthetically generated peptide
gtttcggcctcgccctcccc

SEQ ID NO: 5406 - DNA, 20 bp, Artificial
  Synthetically generated peptide
tttcggcctcgccctcccca

SEQ ID NO: 5407 - DNA, 20 bp, Artificial
  Synthetically generated peptide
ttcggcctcgccctccccaa

SEQ ID NO: 5408 - DNA, 20 bp, Artificial
  Synthetically generated peptide
tcggcctcgccctccccaaa

SEQ ID NO: 5409 - DNA, 20 bp, Artificial
  Synthetically generated peptide
cggcctcgccctccccaaac

SEQ ID NO: 5410 - DNA, 20 bp, Artificial
  Synthetically generated peptide
ggcctcgccctccccaaaca

SEQ ID NO: 5411 - DNA, 20 bp, Artificial
  Synthetically generated peptide
gcctcgccctccccaaacag

SEQ ID NO: 5412 - DNA, 20 bp, Artificial
  Synthetically generated peptide
cctcgccctccccaaacagc

SEQ ID NO: 5413 - DNA, 20 bp, Artificial
  Synthetically generated peptide
ctcgccctccccaaacagcg

SEQ ID NO: 5414 - DNA, 20 bp, Artificial
  Synthetically generated peptide
tcgccctccccaaacagcgt

SEQ ID NO: 5415 - DNA, 20 bp, Artificial
  Synthetically generated peptide
cgccctccccaaacagcgtc

SEQ ID NO: 5416 - DNA, 20 bp, Artificial
  Synthetically generated peptide
gccctccccaaacagcgtca

SEQ ID NO: 5417 - DNA, 20 bp, Artificial
  Synthetically generated peptide
ccctccccaaacagcgtcag

SEQ ID NO: 5418 - DNA, 20 bp, Artificial
  Synthetically generated peptide
cctccccaaacagcgtcaga

SEQ ID NO: 5419 - DNA, 20 bp, Artificial
  Synthetically generated peptide
ctccccaaacagcgtcagat

SEQ ID NO: 5420 - DNA, 20 bp, Artificial
  Synthetically generated peptide
tccccaaacagcgtcagatt

SEQ ID NO: 5421 - DNA, 20 bp, Artificial
  Synthetically generated peptide
ccccaaacagcgtcagatta

SEQ ID NO: 5422 - DNA, 20 bp, Artificial
  Synthetically generated peptide
cccaaacagcgtcagattac

SEQ ID NO: 5423 - DNA, 20 bp, Artificial
  Synthetically generated peptide
ccaaacagcgtcagattacg

SEQ ID NO: 5424 - DNA, 20 bp, Artificial
  Synthetically generated peptide
caaacagcgtcagattacgc

SEQ ID NO: 5425 - DNA, 20 bp, Artificial
  Synthetically generated peptide
aaacagcgtcagattacgcg

SEQ ID NO: 5426 - DNA, 20 bp, Artificial
  Synthetically generated peptide
aacagcgtcagattacgcgc

SEQ ID NO: 5427 - DNA, 20 bp, Artificial
  Synthetically generated peptide
acagcgtcagattacgcgca

SEQ ID NO: 5428 - DNA, 20 bp, Artificial
  Synthetically generated peptide
cagcgtcagattacgcgcag

SEQ ID NO: 5429 - DNA, 20 bp, Artificial
  Synthetically generated peptide
agcgtcagattacgcgcaga

SEQ ID NO: 5430 - DNA, 20 bp, Artificial
  Synthetically generated peptide
gcgtcagattacgcgcagag

SEQ ID NO: 5431 - DNA, 20 bp, Artificial
  Synthetically generated peptide
cgtcagattacgcgcagagg

SEQ ID NO: 5432 - DNA, 20 bp, Artificial
  Synthetically generated peptide
gtcagattacgcgcagaggg

SEQ ID NO: 5433 - DNA, 20 bp, Artificial
  Synthetically generated peptide
tcagattacgcgcagaggga

SEQ ID NO: 5434 - DNA, 20 bp, Artificial
  Synthetically generated peptide
tcaggtttcggcctcgccct

SEQ ID NO: 5435 - DNA, 20 bp, Artificial
  Synthetically generated peptide
atcaggtttcggcctcgccc

SEQ ID NO: 5436 - DNA, 20 bp, Artificial
  Synthetically generated peptide
gatcaggtttcggcctcgcc

SEQ ID NO: 5437 - DNA, 20 bp, Artificial
  Synthetically generated peptide
ggatcaggtttcggcctcgc

SEQ ID NO: 5438 - DNA, 20 bp, Artificial
  Synthetically generated peptide
aggatcaggtttcggcctcg

SEQ ID NO: 5439 - DNA, 20 bp, Artificial
  Synthetically generated peptide
gaggatcaggtttcggcctc

SEQ ID NO: 5440 - DNA, 20 bp, Artificial
  Synthetically generated peptide
ggaggatcaggtttcggcct

SEQ ID NO: 5441 - DNA, 20 bp, Artificial
  Synthetically generated peptide
tggaggatcaggtttcggcc

SEQ ID NO: 5442 - DNA, 20 bp, Artificial
  Synthetically generated peptide
ctggaggatcaggtttcggc

SEQ ID NO: 5443 - DNA, 20 bp, Artificial
  Synthetically generated peptide
actggaggatcaggtttcgg

SEQ ID NO: 5444 - DNA, 20 bp, Artificial
  Synthetically generated peptide
gactggaggatcaggtttcg

SEQ ID NO: 5445 - DNA, 23 bp, Artificial
  Synthetically generated peptide
catcgagcccgccatcgcagcac

SEQ ID NO: 5446 - DNA, 20 bp, Artificial
  Synthetically generated peptide
atcgagcccgccatcgcagc

SEQ ID NO: 5447 - DNA, 20 bp, Artificial
  Synthetically generated peptide
tcgagcccgccatcgcagca

SEQ ID NO: 5448 - DNA, 20 bp, Artificial
  Synthetically generated peptide
cgagcccgccatcgcagcac

SEQ ID NO: 5449 - DNA, 20 bp, Artificial
  Synthetically generated peptide
gagcccgccatcgcagcaca

SEQ ID NO: 5450 - DNA, 20 bp, Artificial
  Synthetically generated peptide
agcccgccatcgcagcacag

SEQ ID NO: 5451 - DNA, 20 bp, Artificial
  Synthetically generated peptide
gcccgccatcgcagcacaga

SEQ ID NO: 5452 - DNA, 20 bp, Artificial
  Synthetically generated peptide
cccgccatcgcagcacagag

SEQ ID NO: 5453 - DNA, 20 bp, Artificial
  Synthetically generated peptide
ccgccatcgcagcacagagt

SEQ ID NO: 5454 - DNA, 20 bp, Artificial
  Synthetically generated peptide
cgccatcgcagcacagagta

SEQ ID NO: 5455 - DNA, 20 bp, Artificial
  Synthetically generated peptide
gccatcgcagcacagagtag

SEQ ID NO: 5456 - DNA, 20 bp, Artificial
  Synthetically generated peptide
ccatcgcagcacagagtagg

SEQ ID NO: 5457 - DNA, 20 bp, Artificial
  Synthetically generated peptide
catcgcagcacagagtagga

SEQ ID NO: 5458 - DNA, 20 bp, Artificial
  Synthetically generated peptide
ccatcgagcccgccatcgca

SEQ ID NO: 5459 - DNA, 20 bp, Artificial
  Synthetically generated peptide
cccatcgagcccgccatcgc

SEQ ID NO: 5460 - DNA, 20 bp, Artificial
  Synthetically generated peptide
ccccatcgagcccgccatcg

SEQ ID NO: 5461 - DNA, 20 bp, Artificial
  Synthetically generated peptide
tccccatcgagcccgccatc

SEQ ID NO: 5462 - DNA, 20 bp, Artificial
  Synthetically generated peptide
atccccatcgagcccgccat

SEQ ID NO: 5463 - DNA, 20 bp, Artificial
  Synthetically generated peptide
tatccccatcgagcccgcca

SEQ ID NO: 5464 - DNA, 20 bp, Artificial
  Synthetically generated peptide
ttatccccatcgagcccgcc

SEQ ID NO: 5465 - DNA, 20 bp, Artificial
  Synthetically generated peptide
gttatccccatcgagcccgc

SEQ ID NO: 5466 - DNA, 20 bp, Artificial
  Synthetically generated peptide
agttatccccatcgagcccg

SEQ ID NO: 5467 - DNA, 20 bp, Artificial
  Synthetically generated peptide
gagttatccccatcgagccc

SEQ ID NO: 5468 - DNA, 20 bp, Artificial
  Synthetically generated peptide
agagttatccccatcgagcc

SEQ ID NO: 5469 - DNA, 20 bp, Artificial
  Synthetically generated peptide
cagagttatccccatcgagc

SEQ ID NO: 5470 - DNA, 20 bp, Artificial
  Synthetically generated peptide
tcagagttatccccatcgag

SEQ ID NO: 5471 - DNA, 20 bp, Artificial
  Synthetically generated peptide
gtcagagttatccccatcga

SEQ ID NO: 5472 - DNA, 20 bp, Artificial
  Synthetically generated peptide
ggtcagagttatccccatcg

SEQ ID NO: 5473 - DNA, 27 bp, Artificial
  Synthetically generated peptide
gagcgcctcgacgtcgctgcggaaacc

SEQ ID NO: 5474 - DNA, 20 bp, Artificial
  Synthetically generated peptide
agcgcctcgacgtcgctgcg

SEQ ID NO: 5475 - DNA, 20 bp, Artificial
  Synthetically generated peptide
gcgcctcgacgtcgctgcgg

SEQ ID NO: 5476 - DNA, 20 bp, Artificial
  Synthetically generated peptide
cgcctcgacgtcgctgcgga

SEQ ID NO: 5477 - DNA, 20 bp, Artificial
  Synthetically generated peptide
gcctcgacgtcgctgcggaa

SEQ ID NO: 5478 - DNA, 20 bp, Artificial
  Synthetically generated peptide
cctcgacgtcgctgcggaaa

SEQ ID NO: 5479 - DNA, 20 bp, Artificial
  Synthetically generated peptide
ctcgacgtcgctgcggaaac

SEQ ID NO: 5480 - DNA, 20 bp, Artificial
  Synthetically generated peptide
tcgacgtcgctgcggaaacc

SEQ ID NO: 5481 - DNA, 20 bp, Artificial
  Synthetically generated peptide
cgacgtcgctgcggaaacct

SEQ ID NO: 5482 - DNA, 20 bp, Artificial
  Synthetically generated peptide
gacgtcgctgcggaaacctt

SEQ ID NO: 5483 - DNA, 20 bp, Artificial
  Synthetically generated peptide
acgtcgctgcggaaaccttc

SEQ ID NO: 5484 - DNA, 20 bp, Artificial
  Synthetically generated peptide
cgtcgctgcggaaaccttct

SEQ ID NO: 5485 - DNA, 20 bp, Artificial
  Synthetically generated peptide
gtcgctgcggaaaccttcta

SEQ ID NO: 5486 - DNA, 20 bp, Artificial
  Synthetically generated peptide
tcgctgcggaaaccttctag

SEQ ID NO: 5487 - DNA, 20 bp, Artificial
  Synthetically generated peptide
cgctgcggaaaccttctagg

SEQ ID NO: 5488 - DNA, 20 bp, Artificial
  Synthetically generated peptide
gctgcggaaaccttctaggg

SEQ ID NO: 5489 - DNA, 20 bp, Artificial
  Synthetically generated peptide
ctgcggaaaccttctagggt

SEQ ID NO: 5490 - DNA, 20 bp, Artificial
  Synthetically generated peptide
tgcggaaaccttctagggtg

SEQ ID NO: 5491 - DNA, 20 bp, Artificial
  Synthetically generated peptide
gcggaaaccttctagggtgt

SEQ ID NO: 5492 - DNA, 20 bp, Artificial
  Synthetically generated peptide
cggaaaccttctagggtgtg

SEQ ID NO: 5493 - DNA, 20 bp, Artificial
  Synthetically generated peptide
tgagcgcctcgacgtcgctg

SEQ ID NO: 5494 - DNA, 20 bp, Artificial
  Synthetically generated peptide
atgagcgcctcgacgtcgct

SEQ ID NO: 5495 - DNA, 20 bp, Artificial
  Synthetically generated peptide
catgagcgcctcgacgtcgc

SEQ ID NO: 5496 - DNA, 20 bp, Artificial
  Synthetically generated peptide
ccatgagcgcctcgacgtcg

SEQ ID NO: 5497 - DNA, 20 bp, Artificial
  Synthetically generated peptide
accatgagcgcctcgacgtc

SEQ ID NO: 5498 - DNA, 20 bp, Artificial
  Synthetically generated peptide
aaccatgagcgcctcgacgt

SEQ ID NO: 5499 - DNA, 20 bp, Artificial
  Synthetically generated peptide
caaccatgagcgcctcgacg

SEQ ID NO: 5500 - DNA, 20 bp, Artificial
  Synthetically generated peptide
gcaaccatgagcgcctcgac

SEQ ID NO: 5501 - DNA, 20 bp, Artificial
  Synthetically generated peptide
tgcaaccatgagcgcctcga

SEQ ID NO: 5502 - DNA, 20 bp, Artificial
  Synthetically generated peptide
ctgcaaccatgagcgcctcg

SEQ ID NO: 5503 - DNA, 20 bp, Artificial
  Synthetically generated peptide
cctgcaaccatgagcgcctc

SEQ ID NO: 5504 - DNA, 20 bp, Artificial
  Synthetically generated peptide
gcctgcaaccatgagcgcct

SEQ ID NO: 5505 - DNA, 20 bp, Artificial
  Synthetically generated peptide
cgcctgcaaccatgagcgcc

SEQ ID NO: 5506 - DNA, 20 bp, Artificial
  Synthetically generated peptide
ccgcctgcaaccatgagcgc

SEQ ID NO: 5507 - DNA, 20 bp, Artificial
  Synthetically generated peptide
cccgcctgcaaccatgagcg

SEQ ID NO: 5508 - DNA, 20 bp, Artificial
  Synthetically generated peptide
gcccgcctgcaaccatgagc

SEQ ID NO: 5509 - DNA, 20 bp, Artificial
  Synthetically generated peptide
cgcccgcctgcaaccatgag

SEQ ID NO: 5510 - DNA, 20 bp, Artificial
  Synthetically generated peptide
gcgcccgcctgcaaccatga

SEQ ID NO: 5511 - DNA, 20 bp, Artificial
  Synthetically generated peptide
ggcgcccgcctgcaaccatg

SEQ ID NO: 5512 - DNA, 20 bp, Artificial
  Synthetically generated peptide
cggcgcccgcctgcaaccat

SEQ ID NO: 5513 - DNA, 20 bp, Artificial
  Synthetically generated peptide
gcggcgcccgcctgcaacca

SEQ ID NO: 5514 - DNA, 20 bp, Artificial
  Synthetically generated peptide
ggcggcgcccgcctgcaacc

SEQ ID NO: 5515 - DNA, 20 bp, Artificial
  Synthetically generated peptide
cggcggcgcccgcctgcaac

SEQ ID NO: 5516 - DNA, 20 bp, Artificial
  Synthetically generated peptide
acggcggcgcccgcctgcaa

SEQ ID NO: 5517 - DNA, 20 bp, Artificial
  Synthetically generated peptide
aacggcggcgcccgcctgca

SEQ ID NO: 5518 - DNA, 20 bp, Artificial
  Synthetically generated peptide
gaacggcggcgcccgcctgc

SEQ ID NO: 5519 - DNA, 20 bp, Artificial
  Synthetically generated peptide
tgaacggcggcgcccgcctg

SEQ ID NO: 5520 - DNA, 20 bp, Artificial
  Synthetically generated peptide
ctgaacggcggcgcccgcct

SEQ ID NO: 5521 - DNA, 20 bp, Artificial
  Synthetically generated peptide
actgaacggcggcgcccgcc

SEQ ID NO: 5522 - DNA, 20 bp, Artificial
  Synthetically generated peptide
aactgaacggcggcgcccgc

SEQ ID NO: 5523 - DNA, 20 bp, Artificial
  Synthetically generated peptide
gaactgaacggcggcgcccg

SEQ ID NO: 5524 - DNA, 20 bp, Artificial
  Synthetically generated peptide
tgaactgaacggcggcgccc

SEQ ID NO: 5525 - DNA, 20 bp, Artificial
  Synthetically generated peptide
ctgaactgaacggcggcgcc

SEQ ID NO: 5526 - DNA, 20 bp, Artificial
  Synthetically generated peptide
cctgaactgaacggcggcgc

SEQ ID NO: 5527 - DNA, 20 bp, Artificial
  Synthetically generated peptide
ccctgaactgaacggcggcg

SEQ ID NO: 5528 - DNA, 20 bp, Artificial
  Synthetically generated peptide
accctgaactgaacggcggc

SEQ ID NO: 5529 - DNA, 20 bp, Artificial
  Synthetically generated peptide
gaccctgaactgaacggcgg

SEQ ID NO: 5530 - DNA, 20 bp, Artificial
  Synthetically generated peptide
agaccctgaactgaacggcg

SEQ ID NO: 5531 - DNA, 20 bp, Artificial
  Synthetically generated peptide
cagaccctgaactgaacggc

SEQ ID NO: 5532 - DNA, 20 bp, Artificial
  Synthetically generated peptide
tcagaccctgaactgaacgg

SEQ ID NO: 5533 - DNA, 20 bp, Artificial
  Synthetically generated peptide
ctcagaccctgaactgaacg

SEQ ID NO: 5534 - DNA, 26 bp, Artificial
  Synthetically generated peptide
caagtccgggccgcgggccccggggc

SEQ ID NO: 5535 - DNA, 20 bp, Artificial
  Synthetically generated peptide
aagtccgggccgcgggcccc

SEQ ID NO: 5536 - DNA, 20 bp, Artificial
  Synthetically generated peptide
agtccgggccgcgggccccg

SEQ ID NO: 5537 - DNA, 20 bp, Artificial
  Synthetically generated peptide
gtccgggccgcgggccccgg

SEQ ID NO: 5538 - DNA, 20 bp, Artificial
  Synthetically generated peptide
tccgggccgcgggccccggg

SEQ ID NO: 5539 - DNA, 20 bp, Artificial
  Synthetically generated peptide
ccgggccgcgggccccgggg

SEQ ID NO: 5540 - DNA, 20 bp, Artificial
  Synthetically generated peptide
cgggccgcgggccccggggc

SEQ ID NO: 5541 - DNA, 20 bp, Artificial
  Synthetically generated peptide
gggccgcgggccccggggct

SEQ ID NO: 5542 - DNA, 20 bp, Artificial
  Synthetically generated peptide
ggccgcgggccccggggctg

SEQ ID NO: 5543 - DNA, 20 bp, Artificial
  Synthetically generated peptide
gccgcgggccccggggctgc

SEQ ID NO: 5544 - DNA, 20 bp, Artificial
  Synthetically generated peptide
ccgcgggccccggggctgcc

SEQ ID NO: 5545 - DNA, 20 bp, Artificial
  Synthetically generated peptide
cgcgggccccggggctgcct

SEQ ID NO: 5546 - DNA, 20 bp, Artificial
  Synthetically generated peptide
gcgggccccggggctgcctt

SEQ ID NO: 5547 - DNA, 20 bp, Artificial
  Synthetically generated peptide
cgggccccggggctgccttc

SEQ ID NO: 5548 - DNA, 20 bp, Artificial
  Synthetically generated peptide
gggccccggggctgccttca

SEQ ID NO: 5549 - DNA, 20 bp, Artificial
  Synthetically generated peptide
ggccccggggctgccttcag

SEQ ID NO: 5550 - DNA, 20 bp, Artificial
  Synthetically generated peptide
gccccggggctgccttcagc

SEQ ID NO: 5551 - DNA, 20 bp, Artificial
  Synthetically generated peptide
ccccggggctgccttcagcg

SEQ ID NO: 5552 - DNA, 20 bp, Artificial
  Synthetically generated peptide
cccggggctgccttcagcgg

SEQ ID NO: 5553 - DNA, 20 bp, Artificial
  Synthetically generated peptide
ccggggctgccttcagcggg

SEQ ID NO: 5554 - DNA, 20 bp, Artificial
  Synthetically generated peptide
cggggctgccttcagcgggt

SEQ ID NO: 5555 - DNA, 20 bp, Artificial
  Synthetically generated peptide
ggggctgccttcagcgggtg

SEQ ID NO: 5556 - DNA, 20 bp, Artificial
  Synthetically generated peptide
gggctgccttcagcgggtgc

SEQ ID NO: 5557 - DNA, 20 bp, Artificial
  Synthetically generated peptide
ggctgccttcagcgggtgcg

SEQ ID NO: 5558 - DNA, 20 bp, Artificial
  Synthetically generated peptide
gctgccttcagcgggtgcgc

SEQ ID NO: 5559 - DNA, 20 bp, Artificial
  Synthetically generated peptide
ctgccttcagcgggtgcgcc

SEQ ID NO: 5560 - DNA, 20 bp, Artificial
  Synthetically generated peptide
tgccttcagcgggtgcgccc

SEQ ID NO: 5561 - DNA, 20 bp, Artificial
  Synthetically generated peptide
gccttcagcgggtgcgcccc

SEQ ID NO: 5562 - DNA, 20 bp, Artificial
  Synthetically generated peptide
ccttcagcgggtgcgccccg

SEQ ID NO: 5563 - DNA, 20 bp, Artificial
  Synthetically generated peptide
cttcagcgggtgcgccccgc

SEQ ID NO: 5564 - DNA, 20 bp, Artificial
  Synthetically generated peptide
ttcagcgggtgcgccccgcg

SEQ ID NO: 5565 - DNA, 20 bp, Artificial
  Synthetically generated peptide
tcagcgggtgcgccccgcgc

SEQ ID NO: 5566 - DNA, 20 bp, Artificial
  Synthetically generated peptide
cagcgggtgcgccccgcgcg

SEQ ID NO: 5567 - DNA, 20 bp, Artificial
  Synthetically generated peptide
agcgggtgcgccccgcgcgg

SEQ ID NO: 5568 - DNA, 20 bp, Artificial
  Synthetically generated peptide
gcgggtgcgccccgcgcggt

SEQ ID NO: 5569 - DNA, 20 bp, Artificial
  Synthetically generated peptide
cgggtgcgccccgcgcggtc

SEQ ID NO: 5570 - DNA, 20 bp, Artificial
  Synthetically generated peptide
gggtgcgccccgcgcggtcc

SEQ ID NO: 5571 - DNA, 20 bp, Artificial
  Synthetically generated peptide
ggtgcgccccgcgcggtccc

SEQ ID NO: 5572 - DNA, 20 bp, Artificial
  Synthetically generated peptide
gtgcgccccgcgcggtcccg

SEQ ID NO: 5573 - DNA, 20 bp, Artificial
  Synthetically generated peptide
tgcgccccgcgcggtcccgt

SEQ ID NO: 5574 - DNA, 20 bp, Artificial
  Synthetically generated peptide
gcgccccgcgcggtcccgtc

SEQ ID NO: 5575 - DNA, 20 bp, Artificial
  Synthetically generated peptide
cgccccgcgcggtcccgtca

SEQ ID NO: 5576 - DNA, 20 bp, Artificial
  Synthetically generated peptide
gccccgcgcggtcccgtcag

SEQ ID NO: 5577 - DNA, 20 bp, Artificial
  Synthetically generated peptide
ccccgcgcggtcccgtcagc

SEQ ID NO: 5578 - DNA, 20 bp, Artificial
  Synthetically generated peptide
cccgcgcggtcccgtcagcg

SEQ ID NO: 5579 - DNA, 20 bp, Artificial
  Synthetically generated peptide
ccgcgcggtcccgtcagcgc

SEQ ID NO: 5580 - DNA, 20 bp, Artificial
  Synthetically generated peptide
cgcgcggtcccgtcagcgcc

SEQ ID NO: 5581 - DNA, 20 bp, Artificial
  Synthetically generated peptide
gcgcggtcccgtcagcgccg

SEQ ID NO: 5582 - DNA, 20 bp, Artificial
  Synthetically generated peptide
cgcggtcccgtcagcgccga

SEQ ID NO: 5583 - DNA, 20 bp, Artificial
  Synthetically generated peptide
gcggtcccgtcagcgccgag

SEQ ID NO: 5584 - DNA, 20 bp, Artificial
  Synthetically generated peptide
cggtcccgtcagcgccgagg

SEQ ID NO: 5585 - DNA, 20 bp, Artificial
  Synthetically generated peptide
ggtcccgtcagcgccgaggg

SEQ ID NO: 5586 - DNA, 20 bp, Artificial
  Synthetically generated peptide
gtcccgtcagcgccgagggg

SEQ ID NO: 5587 - DNA, 20 bp, Artificial
  Synthetically generated peptide
tcccgtcagcgccgaggggc

SEQ ID NO: 5588 - DNA, 20 bp, Artificial
  Synthetically generated peptide
cccgtcagcgccgaggggcc

SEQ ID NO: 5589 - DNA, 20 bp, Artificial
  Synthetically generated peptide
ccgtcagcgccgaggggccg

SEQ ID NO: 5590 - DNA, 20 bp, Artificial
  Synthetically generated peptide
cgtcagcgccgaggggccgg

SEQ ID NO: 5591 - DNA, 20 bp, Artificial
  Synthetically generated peptide
gtcagcgccgaggggccggt

SEQ ID NO: 5592 - DNA, 20 bp, Artificial
  Synthetically generated peptide
tcagcgccgaggggccggta

SEQ ID NO: 5593 - DNA, 20 bp, Artificial
  Synthetically generated peptide
cagcgccgaggggccggtag

SEQ ID NO: 5594 - DNA, 20 bp, Artificial
  Synthetically generated peptide
agcgccgaggggccggtagc

SEQ ID NO: 5595 - DNA, 20 bp, Artificial
  Synthetically generated peptide
gcgccgaggggccggtagcg

SEQ ID NO: 5596 - DNA, 20 bp, Artificial
  Synthetically generated peptide
cgccgaggggccggtagcgg

SEQ ID NO: 5597 - DNA, 20 bp, Artificial
  Synthetically generated peptide
gccgaggggccggtagcggt

SEQ ID NO: 5598 - DNA, 20 bp, Artificial
  Synthetically generated peptide
ccgaggggccggtagcggtc

SEQ ID NO: 5599 - DNA, 20 bp, Artificial
  Synthetically generated peptide
cgaggggccggtagcggtct

SEQ ID NO: 5600 - DNA, 20 bp, Artificial
  Synthetically generated peptide
gaggggccggtagcggtctc

SEQ ID NO: 5601 - DNA, 20 bp, Artificial
  Synthetically generated peptide
aggggccggtagcggtctca

SEQ ID NO: 5602 - DNA, 20 bp, Artificial
  Synthetically generated peptide
ggggccggtagcggtctcag

SEQ ID NO: 5603 - DNA, 20 bp, Artificial
  Synthetically generated peptide
gggccggtagcggtctcagt

SEQ ID NO: 5604 - DNA, 20 bp, Artificial
  Synthetically generated peptide
ggccggtagcggtctcagtg

SEQ ID NO: 5605 - DNA, 20 bp, Artificial
  Synthetically generated peptide
gccggtagcggtctcagtgg

SEQ ID NO: 5606 - DNA, 20 bp, Artificial
  Synthetically generated peptide
ccggtagcggtctcagtgga

SEQ ID NO: 5607 - DNA, 20 bp, Artificial
  Synthetically generated peptide
cggtagcggtctcagtggac

SEQ ID NO: 5608 - DNA, 20 bp, Artificial
  Synthetically generated peptide
ggtagcggtctcagtggacc

SEQ ID NO: 5609 - DNA, 20 bp, Artificial
  Synthetically generated peptide
gtagcggtctcagtggaccc

SEQ ID NO: 5610 - DNA, 20 bp, Artificial
  Synthetically generated peptide
tagcggtctcagtggacccc

SEQ ID NO: 5611 - DNA, 20 bp, Artificial
  Synthetically generated peptide
agcggtctcagtggaccccc

SEQ ID NO: 5612 - DNA, 20 bp, Artificial
  Synthetically generated peptide
gcggtctcagtggacccccg

SEQ ID NO: 5613 - DNA, 20 bp, Artificial
  Synthetically generated peptide
cggtctcagtggacccccgc

SEQ ID NO: 5614 - DNA, 20 bp, Artificial
  Synthetically generated peptide
ggtctcagtggacccccgcc

SEQ ID NO: 5615 - DNA, 20 bp, Artificial
  Synthetically generated peptide
gtctcagtggacccccgccc

SEQ ID NO: 5616 - DNA, 20 bp, Artificial
  Synthetically generated peptide
tctcagtggacccccgcccc

SEQ ID NO: 5617 - DNA, 20 bp, Artificial
  Synthetically generated peptide
ctcagtggacccccgcccca

SEQ ID NO: 5618 - DNA, 20 bp, Artificial
  Synthetically generated peptide
tcagtggacccccgccccac

SEQ ID NO: 5619 - DNA, 20 bp, Artificial
  Synthetically generated peptide
cagtggacccccgccccacc

SEQ ID NO: 5620 - DNA, 20 bp, Artificial
  Synthetically generated peptide
agtggacccccgccccaccc

SEQ ID NO: 5621 - DNA, 20 bp, Artificial
  Synthetically generated peptide
gtggacccccgccccacccg

SEQ ID NO: 5622 - DNA, 20 bp, Artificial
  Synthetically generated peptide
tggacccccgccccacccgc

SEQ ID NO: 5623 - DNA, 20 bp, Artificial
  Synthetically generated peptide
ggacccccgccccacccgcc

SEQ ID NO: 5624 - DNA, 20 bp, Artificial
  Synthetically generated peptide
gacccccgccccacccgccc

SEQ ID NO: 5625 - DNA, 20 bp, Artificial
  Synthetically generated peptide
acccccgccccacccgcccg

SEQ ID NO: 5626 - DNA, 20 bp, Artificial
  Synthetically generated peptide
cccccgccccacccgcccgg

SEQ ID NO: 5627 - DNA, 20 bp, Artificial
  Synthetically generated peptide
ccccgccccacccgcccggg

SEQ ID NO: 5628 - DNA, 20 bp, Artificial
  Synthetically generated peptide
cccgccccacccgcccggga

SEQ ID NO: 5629 - DNA, 20 bp, Artificial
  Synthetically generated peptide
ccgccccacccgcccgggac

SEQ ID NO: 5630 - DNA, 20 bp, Artificial
  Synthetically generated peptide
cgccccacccgcccgggact

SEQ ID NO: 5631 - DNA, 20 bp, Artificial
  Synthetically generated peptide
gccccacccgcccgggactc

SEQ ID NO: 5632 - DNA, 20 bp, Artificial
  Synthetically generated peptide
ccccacccgcccgggactcg

SEQ ID NO: 5633 - DNA, 20 bp, Artificial
  Synthetically generated peptide
cccacccgcccgggactcgg

SEQ ID NO: 5634 - DNA, 20 bp, Artificial
  Synthetically generated peptide
ccacccgcccgggactcggc

SEQ ID NO: 5635 - DNA, 20 bp, Artificial
  Synthetically generated peptide
cacccgcccgggactcggct

SEQ ID NO: 5636 - DNA, 20 bp, Artificial
  Synthetically generated peptide
acccgcccgggactcggctt

SEQ ID NO: 5637 - DNA, 20 bp, Artificial
  Synthetically generated peptide
cccgcccgggactcggcttc

SEQ ID NO: 5638 - DNA, 20 bp, Artificial
  Synthetically generated peptide
ccgcccgggactcggcttcg

SEQ ID NO: 5639 - DNA, 20 bp, Artificial
  Synthetically generated peptide
cgcccgggactcggcttcgc

SEQ ID NO: 5640 - DNA, 20 bp, Artificial
  Synthetically generated peptide
gcccgggactcggcttcgcg

SEQ ID NO: 5641 - DNA, 20 bp, Artificial
  Synthetically generated peptide
cccgggactcggcttcgcgc

SEQ ID NO: 5642 - DNA, 20 bp, Artificial
  Synthetically generated peptide
ccgggactcggcttcgcgcg

SEQ ID NO: 5643 - DNA, 20 bp, Artificial
  Synthetically generated peptide
cgggactcggcttcgcgcgc

SEQ ID NO: 5644 - DNA, 20 bp, Artificial
  Synthetically generated peptide
gggactcggcttcgcgcgca

SEQ ID NO: 5645 - DNA, 20 bp, Artificial
  Synthetically generated peptide
ggactcggcttcgcgcgcag

SEQ ID NO: 5646 - DNA, 20 bp, Artificial
  Synthetically generated peptide
gactcggcttcgcgcgcaga

SEQ ID NO: 5647 - DNA, 20 bp, Artificial
  Synthetically generated peptide
actcggcttcgcgcgcagag

SEQ ID NO: 5648 - DNA, 20 bp, Artificial
  Synthetically generated peptide
ctcggcttcgcgcgcagaga

SEQ ID NO: 5649 - DNA, 20 bp, Artificial
  Synthetically generated peptide
tcggcttcgcgcgcagagag

SEQ ID NO: 5650 - DNA, 20 bp, Artificial
  Synthetically generated peptide
cggcttcgcgcgcagagagc

SEQ ID NO: 5651 - DNA, 20 bp, Artificial
  Synthetically generated peptide
ggcttcgcgcgcagagagcc

SEQ ID NO: 5652 - DNA, 20 bp, Artificial
  Synthetically generated peptide
gcttcgcgcgcagagagccg

SEQ ID NO: 5653 - DNA, 20 bp, Artificial
  Synthetically generated peptide
cttcgcgcgcagagagccga

SEQ ID NO: 5654 - DNA, 20 bp, Artificial
  Synthetically generated peptide
ttcgcgcgcagagagccgaa

SEQ ID NO: 5655 - DNA, 20 bp, Artificial
  Synthetically generated peptide
tcgcgcgcagagagccgaaa

SEQ ID NO: 5656 - DNA, 20 bp, Artificial
  Synthetically generated peptide
ccaagtccgggccgcgggcc

SEQ ID NO: 5657 - DNA, 20 bp, Artificial
  Synthetically generated peptide
accaagtccgggccgcgggc

SEQ ID NO: 5658 - DNA, 20 bp, Artificial
  Synthetically generated peptide
gaccaagtccgggccgcggg

SEQ ID NO: 5659 - DNA, 20 bp, Artificial
  Synthetically generated peptide
ggaccaagtccgggccgcgg

SEQ ID NO: 5660 - DNA, 20 bp, Artificial
  Synthetically generated peptide
aggaccaagtccgggccgcg

SEQ ID NO: 5661 - DNA, 20 bp, Artificial
  Synthetically generated peptide
caggaccaagtccgggccgc

SEQ ID NO: 5662 - DNA, 20 bp, Artificial
  Synthetically generated peptide
gcaggaccaagtccgggccg

SEQ ID NO: 5663 - DNA, 20 bp, Artificial
  Synthetically generated peptide
cgcaggaccaagtccgggcc

SEQ ID NO: 5664 - DNA, 20 bp, Artificial
  Synthetically generated peptide
gcgcaggaccaagtccgggc

SEQ ID NO: 5665 - DNA, 20 bp, Artificial
  Synthetically generated peptide
tgcgcaggaccaagtccggg

SEQ ID NO: 5666 - DNA, 20 bp, Artificial
  Synthetically generated peptide
ctgcgcaggaccaagtccgg

SEQ ID NO: 5667 - DNA, 20 bp, Artificial
  Synthetically generated peptide
gctgcgcaggaccaagtccg

SEQ ID NO: 5668 - DNA, 20 bp, Artificial
  Synthetically generated peptide
cgctgcgcaggaccaagtcc

SEQ ID NO: 5669 - DNA, 20 bp, Artificial
  Synthetically generated peptide
ccgctgcgcaggaccaagtc

SEQ ID NO: 5670 - DNA, 20 bp, Artificial
  Synthetically generated peptide
cccgctgcgcaggaccaagt

SEQ ID NO: 5671 - DNA, 20 bp, Artificial
  Synthetically generated peptide
gcccgctgcgcaggaccaag

SEQ ID NO: 5672 - DNA, 20 bp, Artificial
  Synthetically generated peptide
cgcccgctgcgcaggaccaa

SEQ ID NO: 5673 - DNA, 20 bp, Artificial
  Synthetically generated peptide
gcgcccgctgcgcaggacca

SEQ ID NO: 5674 - DNA, 20 bp, Artificial
  Synthetically generated peptide
cgcgcccgctgcgcaggacc

SEQ ID NO: 5675 - DNA, 20 bp, Artificial
  Synthetically generated peptide
ccgcgcccgctgcgcaggac

SEQ ID NO: 5676 - DNA, 20 bp, Artificial
  Synthetically generated peptide
cccgcgcccgctgcgcagga

SEQ ID NO: 5677 - DNA, 20 bp, Artificial
  Synthetically generated peptide
ccccgcgcccgctgcgcagg

SEQ ID NO: 5678 - DNA, 20 bp, Artificial
  Synthetically generated peptide
gccccgcgcccgctgcgcag

SEQ ID NO: 5679 - DNA, 20 bp, Artificial
  Synthetically generated peptide
tgccccgcgcccgctgcgca

SEQ ID NO: 5680 - DNA, 20 bp, Artificial
  Synthetically generated peptide
ctgccccgcgcccgctgcgc

SEQ ID NO: 5681 - DNA, 20 bp, Artificial
  Synthetically generated peptide
gctgccccgcgcccgctgcg

SEQ ID NO: 5682 - DNA, 20 bp, Artificial
  Synthetically generated peptide
cgctgccccgcgcccgctgc

SEQ ID NO: 5683 - DNA, 20 bp, Artificial
  Synthetically generated peptide
gcgctgccccgcgcccgctg

SEQ ID NO: 5684 - DNA, 20 bp, Artificial
  Synthetically generated peptide
tgcgctgccccgcgcccgct

SEQ ID NO: 5685 - DNA, 20 bp, Artificial
  Synthetically generated peptide
ctgcgctgccccgcgcccgc

SEQ ID NO: 5686 - DNA, 20 bp, Artificial
  Synthetically generated peptide
gctgcgctgccccgcgcccg

SEQ ID NO: 5687 - DNA, 20 bp, Artificial
  Synthetically generated peptide
cgctgcgctgccccgcgccc

SEQ ID NO: 5688 - DNA, 20 bp, Artificial
  Synthetically generated peptide
ccgctgcgctgccccgcgcc

SEQ ID NO: 5689 - DNA, 20 bp, Artificial
  Synthetically generated peptide
cccgctgcgctgccccgcgc

SEQ ID NO: 5690 - DNA, 20 bp, Artificial
  Synthetically generated peptide
tcccgctgcgctgccccgcg

SEQ ID NO: 5691 - DNA, 20 bp, Artificial
  Synthetically generated peptide
ctcccgctgcgctgccccgc

SEQ ID NO: 5692 - DNA, 20 bp, Artificial
  Synthetically generated peptide
cctcccgctgcgctgccccg

SEQ ID NO: 5693 - DNA, 20 bp, Artificial
  Synthetically generated peptide
tcctcccgctgcgctgcccc

SEQ ID NO: 5694 - DNA, 20 bp, Artificial
  Synthetically generated peptide
ttcctcccgctgcgctgccc

SEQ ID NO: 5695 - DNA, 20 bp, Artificial
  Synthetically generated peptide
cttcctcccgctgcgctgcc

SEQ ID NO: 5696 - DNA, 20 bp, Artificial
  Synthetically generated peptide
gcttcctcccgctgcgctgc

SEQ ID NO: 5697 - DNA, 20 bp, Artificial
  Synthetically generated peptide
cgcttcctcccgctgcgctg

SEQ ID NO: 5698 - DNA, 20 bp, Artificial
  Synthetically generated peptide
tcgcttcctcccgctgcgct

SEQ ID NO: 5699 - DNA, 20 bp, Artificial
  Synthetically generated peptide
ctcgcttcctcccgctgcgc

SEQ ID NO: 5700 - DNA, 20 bp, Artificial
  Synthetically generated peptide
tctcgcttcctcccgctgcg

SEQ ID NO: 5701 - DNA, 20 bp, Artificial
  Synthetically generated peptide
ctctcgcttcctcccgctgc

SEQ ID NO: 5702 - DNA, 20 bp, Artificial
  Synthetically generated peptide
cctctcgcttcctcccgctg

SEQ ID NO: 5703 - DNA, 20 bp, Artificial
  Synthetically generated peptide
acctctcgcttcctcccgct

SEQ ID NO: 5704 - DNA, 20 bp, Artificial
  Synthetically generated peptide
cacctctcgcttcctcccgc

SEQ ID NO: 5705 - DNA, 20 bp, Artificial
  Synthetically generated peptide
gcacctctcgcttcctcccg

SEQ ID NO: 5706 - DNA, 20 bp, Artificial
  Synthetically generated peptide
agcacctctcgcttcctccc

SEQ ID NO: 5707 - DNA, 20 bp, Artificial
  Synthetically generated peptide
cagcacctctcgcttcctcc

SEQ ID NO: 5708 - DNA, 20 bp, Artificial
  Synthetically generated peptide
gcagcacctctcgcttcctc

SEQ ID NO: 5709 - DNA, 20 bp, Artificial
  Synthetically generated peptide
ggcagcacctctcgcttcct

SEQ ID NO: 5710 - DNA, 20 bp, Artificial
  Synthetically generated peptide
gggcagcacctctcgcttcc

SEQ ID NO: 5711 - DNA, 20 bp, Artificial
  Synthetically generated peptide
agggcagcacctctcgcttc

SEQ ID NO: 5712 - DNA, 20 bp, Artificial
  Synthetically generated peptide
gagggcagcacctctcgctt

SEQ ID NO: 5713 - DNA, 20 bp, Artificial
  Synthetically generated peptide
ggagggcagcacctctcgct

SEQ ID NO: 5714 - DNA, 20 bp, Artificial
  Synthetically generated peptide
gggagggcagcacctctcgc

SEQ ID NO: 5715 - DNA, 20 bp, Artificial
  Synthetically generated peptide
ggggagggcagcacctctcg

SEQ ID NO: 5716 - DNA, 25 bp, Artificial
  Synthetically generated peptide
gcgccccgcgcggtcccgtcagcgc

SEQ ID NO: 5717 - DNA, 20 bp, Artificial
  Synthetically generated peptide
cgccccgcgcggtcccgtca

SEQ ID NO: 5718 - DNA, 20 bp, Artificial
  Synthetically generated peptide
gccccgcgcggtcccgtcag

SEQ ID NO: 5719 - DNA, 20 bp, Artificial
  Synthetically generated peptide
ccccgcgcggtcccgtcagc

SEQ ID NO: 5720 - DNA, 20 bp, Artificial
  Synthetically generated peptide
cccgcgcggtcccgtcagcg

SEQ ID NO: 5721 - DNA, 20 bp, Artificial
  Synthetically generated peptide
ccgcgcggtcccgtcagcgc

SEQ ID NO: 5722 - DNA, 20 bp, Artificial
  Synthetically generated peptide
cgcgcggtcccgtcagcgcc

SEQ ID NO: 5723 - DNA, 20 bp, Artificial
  Synthetically generated peptide
gcgcggtcccgtcagcgccg

SEQ ID NO: 5724 - DNA, 20 bp, Artificial
  Synthetically generated peptide
cgcggtcccgtcagcgccga

SEQ ID NO: 5725 - DNA, 20 bp, Artificial
  Synthetically generated peptide
gcggtcccgtcagcgccgag

SEQ ID NO: 5726 - DNA, 20 bp, Artificial
  Synthetically generated peptide
cggtcccgtcagcgccgagg

SEQ ID NO: 5727 - DNA, 20 bp, Artificial
  Synthetically generated peptide
ggtcccgtcagcgccgaggg

SEQ ID NO: 5728 - DNA, 20 bp, Artificial
  Synthetically generated peptide
gtcccgtcagcgccgagggg

SEQ ID NO: 5729 - DNA, 20 bp, Artificial
  Synthetically generated peptide
tcccgtcagcgccgaggggc

SEQ ID NO: 5730 - DNA, 20 bp, Artificial
  Synthetically generated peptide
cccgtcagcgccgaggggcc

SEQ ID NO: 5731 - DNA, 20 bp, Artificial
  Synthetically generated peptide
ccgtcagcgccgaggggccg

SEQ ID NO: 5732 - DNA, 20 bp, Artificial
  Synthetically generated peptide
cgtcagcgccgaggggccgg

SEQ ID NO: 5733 - DNA, 20 bp, Artificial
  Synthetically generated peptide
gtcagcgccgaggggccggt

SEQ ID NO: 5734 - DNA, 20 bp, Artificial
  Synthetically generated peptide
tcagcgccgaggggccggta

SEQ ID NO: 5735 - DNA, 20 bp, Artificial
  Synthetically generated peptide
cagcgccgaggggccggtag

SEQ ID NO: 5736 - DNA, 20 bp, Artificial
  Synthetically generated peptide
agcgccgaggggccggtagc

SEQ ID NO: 5737 - DNA, 20 bp, Artificial
  Synthetically generated peptide
gcgccgaggggccggtagcg

SEQ ID NO: 5738 - DNA, 20 bp, Artificial
  Synthetically generated peptide
cgccgaggggccggtagcgg

SEQ ID NO: 5739 - DNA, 20 bp, Artificial
  Synthetically generated peptide
gccgaggggccggtagcggt

SEQ ID NO: 5740 - DNA, 20 bp, Artificial
  Synthetically generated peptide
ccgaggggccggtagcggtc

SEQ ID NO: 5741 - DNA, 20 bp, Artificial
  Synthetically generated peptide
cgaggggccggtagcggtct

SEQ ID NO: 5742 - DNA, 20 bp, Artificial
  Synthetically generated peptide
gaggggccggtagcggtctc

SEQ ID NO: 5743 - DNA, 20 bp, Artificial
  Synthetically generated peptide
aggggccggtagcggtctca

SEQ ID NO: 5744 - DNA, 20 bp, Artificial
  Synthetically generated peptide
ggggccggtagcggtctcag

SEQ ID NO: 5745 - DNA, 20 bp, Artificial
  Synthetically generated peptide
gggccggtagcggtctcagt

SEQ ID NO: 5746 - DNA, 20 bp, Artificial
  Synthetically generated peptide
ggccggtagcggtctcagtg

SEQ ID NO: 5747 - DNA, 20 bp, Artificial
  Synthetically generated peptide
gccggtagcggtctcagtgg

SEQ ID NO: 5748 - DNA, 20 bp, Artificial
  Synthetically generated peptide
ccggtagcggtctcagtgga

SEQ ID NO: 5749 - DNA, 20 bp, Artificial
  Synthetically generated peptide
cggtagcggtctcagtggac

SEQ ID NO: 5750 - DNA, 20 bp, Artificial
  Synthetically generated peptide
ggtagcggtctcagtggacc

SEQ ID NO: 5751 - DNA, 20 bp, Artificial
  Synthetically generated peptide
gtagcggtctcagtggaccc

SEQ ID NO: 5752 - DNA, 20 bp, Artificial
  Synthetically generated peptide
tagcggtctcagtggacccc

SEQ ID NO: 5753 - DNA, 20 bp, Artificial
  Synthetically generated peptide
agcggtctcagtggaccccc

SEQ ID NO: 5754 - DNA, 20 bp, Artificial
  Synthetically generated peptide
gcggtctcagtggacccccg

SEQ ID NO: 5755 - DNA, 20 bp, Artificial
  Synthetically generated peptide
cggtctcagtggacccccgc

SEQ ID NO: 5756 - DNA, 20 bp, Artificial
  Synthetically generated peptide
ggtctcagtggacccccgcc

SEQ ID NO: 5757 - DNA, 20 bp, Artificial
  Synthetically generated peptide
gtctcagtggacccccgccc

SEQ ID NO: 5758 - DNA, 20 bp, Artificial
  Synthetically generated peptide
tctcagtggacccccgcccc

SEQ ID NO: 5759 - DNA, 20 bp, Artificial
  Synthetically generated peptide
ctcagtggacccccgcccca

SEQ ID NO: 5760 - DNA, 20 bp, Artificial
  Synthetically generated peptide
tcagtggacccccgccccac

SEQ ID NO: 5761 - DNA, 20 bp, Artificial
  Synthetically generated peptide
cagtggacccccgccccacc

SEQ ID NO: 5762 - DNA, 20 bp, Artificial
  Synthetically generated peptide
agtggacccccgccccaccc

SEQ ID NO: 5763 - DNA, 20 bp, Artificial
  Synthetically generated peptide
gtggacccccgccccacccg

SEQ ID NO: 5764 - DNA, 20 bp, Artificial
  Synthetically generated peptide
tggacccccgccccacccgc

SEQ ID NO: 5765 - DNA, 20 bp, Artificial
  Synthetically generated peptide
ggacccccgccccacccgcc

SEQ ID NO: 5766 - DNA, 20 bp, Artificial
  Synthetically generated peptide
gacccccgccccacccgccc

SEQ ID NO: 5767 - DNA, 20 bp, Artificial
  Synthetically generated peptide
acccccgccccacccgcccg

SEQ ID NO: 5768 - DNA, 20 bp, Artificial
  Synthetically generated peptide
cccccgccccacccgcccgg

SEQ ID NO: 5769 - DNA, 20 bp, Artificial
  Synthetically generated peptide
ccccgccccacccgcccggg

SEQ ID NO: 5770 - DNA, 20 bp, Artificial
  Synthetically generated peptide
cccgccccacccgcccggga

SEQ ID NO: 5771 - DNA, 20 bp, Artificial
  Synthetically generated peptide
ccgccccacccgcccgggac

SEQ ID NO: 5772 - DNA, 20 bp, Artificial
  Synthetically generated peptide
cgccccacccgcccgggact

SEQ ID NO: 5773 - DNA, 20 bp, Artificial
  Synthetically generated peptide
gccccacccgcccgggactc

SEQ ID NO: 5774 - DNA, 20 bp, Artificial
  Synthetically generated peptide
ccccacccgcccgggactcg

SEQ ID NO: 5775 - DNA, 20 bp, Artificial
  Synthetically generated peptide
cccacccgcccgggactcgg

SEQ ID NO: 5776 - DNA, 20 bp, Artificial
  Synthetically generated peptide
ccacccgcccgggactcggc

SEQ ID NO: 5777 - DNA, 20 bp, Artificial
  Synthetically generated peptide
cacccgcccgggactcggct

SEQ ID NO: 5778 - DNA, 20 bp, Artificial
  Synthetically generated peptide
acccgcccgggactcggctt

SEQ ID NO: 5779 - DNA, 20 bp, Artificial
  Synthetically generated peptide
cccgcccgggactcggcttc

SEQ ID NO: 5780 - DNA, 20 bp, Artificial
  Synthetically generated peptide
ccgcccgggactcggcttcg

SEQ ID NO: 5781 - DNA, 20 bp, Artificial
  Synthetically generated peptide
cgcccgggactcggcttcgc

SEQ ID NO: 5782 - DNA, 20 bp, Artificial
  Synthetically generated peptide
gcccgggactcggcttcgcg

SEQ ID NO: 5783 - DNA, 20 bp, Artificial
  Synthetically generated peptide
cccgggactcggcttcgcgc

SEQ ID NO: 5784 - DNA, 20 bp, Artificial
  Synthetically generated peptide
ccgggactcggcttcgcgcg

SEQ ID NO: 5785 - DNA, 20 bp, Artificial
  Synthetically generated peptide
cgggactcggcttcgcgcgc

SEQ ID NO: 5786 - DNA, 20 bp, Artificial
  Synthetically generated peptide
gggactcggcttcgcgcgca

SEQ ID NO: 5787 - DNA, 20 bp, Artificial
  Synthetically generated peptide
ggactcggcttcgcgcgcag

SEQ ID NO: 5788 - DNA, 20 bp, Artificial
  Synthetically generated peptide
gactcggcttcgcgcgcaga

SEQ ID NO: 5789 - DNA, 20 bp, Artificial
  Synthetically generated peptide
actcggcttcgcgcgcagag

SEQ ID NO: 5790 - DNA, 20 bp, Artificial
  Synthetically generated peptide
ctcggcttcgcgcgcagaga

SEQ ID NO: 5791 - DNA, 20 bp, Artificial
  Synthetically generated peptide
tcggcttcgcgcgcagagag

SEQ ID NO: 5792 - DNA, 20 bp, Artificial
  Synthetically generated peptide
cggcttcgcgcgcagagagc

SEQ ID NO: 5793 - DNA, 20 bp, Artificial
  Synthetically generated peptide
ggcttcgcgcgcagagagcc

SEQ ID NO: 5794 - DNA, 20 bp, Artificial
  Synthetically generated peptide
gcttcgcgcgcagagagccg

SEQ ID NO: 5795 - DNA, 20 bp, Artificial
  Synthetically generated peptide
cttcgcgcgcagagagccga

SEQ ID NO: 5796 - DNA, 20 bp, Artificial
  Synthetically generated peptide
ttcgcgcgcagagagccgaa

SEQ ID NO: 5797 - DNA, 20 bp, Artificial
  Synthetically generated peptide
tcgcgcgcagagagccgaaa

SEQ ID NO: 5798 - DNA, 20 bp, Artificial
  Synthetically generated peptide
tgcgccccgcgcggtcccgt

SEQ ID NO: 5799 - DNA, 20 bp, Artificial
  Synthetically generated peptide
gtgcgccccgcgcggtcccg

SEQ ID NO: 5800 - DNA, 20 bp, Artificial
  Synthetically generated peptide
ggtgcgccccgcgcggtccc

SEQ ID NO: 5801 - DNA, 20 bp, Artificial
  Synthetically generated peptide
gggtgcgccccgcgcggtcc

SEQ ID NO: 5802 - DNA, 20 bp, Artificial
  Synthetically generated peptide
cgggtgcgccccgcgcggtc

SEQ ID NO: 5803 - DNA, 20 bp, Artificial
  Synthetically generated peptide
gcgggtgcgccccgcgcggt

SEQ ID NO: 5804 - DNA, 20 bp, Artificial
  Synthetically generated peptide
agcgggtgcgccccgcgcgg

SEQ ID NO: 5805 - DNA, 20 bp, Artificial
  Synthetically generated peptide
cagcgggtgcgccccgcgcg

SEQ ID NO: 5806 - DNA, 20 bp, Artificial
  Synthetically generated peptide
tcagcgggtgcgccccgcgc

SEQ ID NO: 5807 - DNA, 20 bp, Artificial
  Synthetically generated peptide
ttcagcgggtgcgccccgcg

SEQ ID NO: 5808 - DNA, 20 bp, Artificial
  Synthetically generated peptide
cttcagcgggtgcgccccgc

SEQ ID NO: 5809 - DNA, 20 bp, Artificial
  Synthetically generated peptide
ccttcagcgggtgcgccccg

SEQ ID NO: 5810 - DNA, 20 bp, Artificial
  Synthetically generated peptide
gccttcagcgggtgcgcccc

SEQ ID NO: 5811 - DNA, 20 bp, Artificial
  Synthetically generated peptide
tgccttcagcgggtgcgccc

SEQ ID NO: 5812 - DNA, 20 bp, Artificial
  Synthetically generated peptide
ctgccttcagcgggtgcgcc

SEQ ID NO: 5813 - DNA, 20 bp, Artificial
  Synthetically generated peptide
gctgccttcagcgggtgcgc

SEQ ID NO: 5814 - DNA, 20 bp, Artificial
  Synthetically generated peptide
ggctgccttcagcgggtgcg

SEQ ID NO: 5815 - DNA, 20 bp, Artificial
  Synthetically generated peptide
gggctgccttcagcgggtgc

SEQ ID NO: 5816 - DNA, 20 bp, Artificial
  Synthetically generated peptide
ggggctgccttcagcgggtg

SEQ ID NO: 5817 - DNA, 20 bp, Artificial
  Synthetically generated peptide
cggggctgccttcagcgggt

SEQ ID NO: 5818 - DNA, 20 bp, Artificial
  Synthetically generated peptide
ccggggctgccttcagcggg

SEQ ID NO: 5819 - DNA, 20 bp, Artificial
  Synthetically generated peptide
cccggggctgccttcagcgg

SEQ ID NO: 5820 - DNA, 20 bp, Artificial
  Synthetically generated peptide
ccccggggctgccttcagcg

SEQ ID NO: 5821 - DNA, 20 bp, Artificial
  Synthetically generated peptide
gccccggggctgccttcagc

SEQ ID NO: 5822 - DNA, 20 bp, Artificial
  Synthetically generated peptide
ggccccggggctgccttcag

SEQ ID NO: 5823 - DNA, 20 bp, Artificial
  Synthetically generated peptide
gggccccggggctgccttca

SEQ ID NO: 5824 - DNA, 20 bp, Artificial
  Synthetically generated peptide
cgggccccggggctgccttc

SEQ ID NO: 5825 - DNA, 20 bp, Artificial
  Synthetically generated peptide
gcgggccccggggctgcctt

SEQ ID NO: 5826 - DNA, 20 bp, Artificial
  Synthetically generated peptide
cgcgggccccggggctgcct

SEQ ID NO: 5827 - DNA, 20 bp, Artificial
  Synthetically generated peptide
ccgcgggccccggggctgcc

SEQ ID NO: 5828 - DNA, 20 bp, Artificial
  Synthetically generated peptide
gccgcgggccccggggctgc

SEQ ID NO: 5829 - DNA, 20 bp, Artificial
  Synthetically generated peptide
ggccgcgggccccggggctg

SEQ ID NO: 5830 - DNA, 20 bp, Artificial
  Synthetically generated peptide
gggccgcgggccccggggct

SEQ ID NO: 5831 - DNA, 20 bp, Artificial
  Synthetically generated peptide
cgggccgcgggccccggggc

SEQ ID NO: 5832 - DNA, 20 bp, Artificial
  Synthetically generated peptide
ccgggccgcgggccccgggg

SEQ ID NO: 5833 - DNA, 20 bp, Artificial
  Synthetically generated peptide
tccgggccgcgggccccggg

SEQ ID NO: 5834 - DNA, 20 bp, Artificial
  Synthetically generated peptide
gtccgggccgcgggccccgg

SEQ ID NO: 5835 - DNA, 20 bp, Artificial
  Synthetically generated peptide
agtccgggccgcgggccccg

SEQ ID NO: 5836 - DNA, 20 bp, Artificial
  Synthetically generated peptide
aagtccgggccgcgggcccc

SEQ ID NO: 5837 - DNA, 20 bp, Artificial
  Synthetically generated peptide
caagtccgggccgcgggccc

SEQ ID NO: 5838 - DNA, 20 bp, Artificial
  Synthetically generated peptide
ccaagtccgggccgcgggcc

SEQ ID NO: 5839 - DNA, 20 bp, Artificial
  Synthetically generated peptide
accaagtccgggccgcgggc

SEQ ID NO: 5840 - DNA, 20 bp, Artificial
  Synthetically generated peptide
gaccaagtccgggccgcggg

SEQ ID NO: 5841 - DNA, 20 bp, Artificial
  Synthetically generated peptide
ggaccaagtccgggccgcgg

SEQ ID NO: 5842 - DNA, 20 bp, Artificial
  Synthetically generated peptide
aggaccaagtccgggccgcg

SEQ ID NO: 5843 - DNA, 20 bp, Artificial
  Synthetically generated peptide
caggaccaagtccgggccgc

SEQ ID NO: 5844 - DNA, 20 bp, Artificial
  Synthetically generated peptide
gcaggaccaagtccgggccg

SEQ ID NO: 5845 - DNA, 20 bp, Artificial
  Synthetically generated peptide
cgcaggaccaagtccgggcc

SEQ ID NO: 5846 - DNA, 20 bp, Artificial
  Synthetically generated peptide
gcgcaggaccaagtccgggc

SEQ ID NO: 5847 - DNA, 20 bp, Artificial
  Synthetically generated peptide
tgcgcaggaccaagtccggg

SEQ ID NO: 5848 - DNA, 20 bp, Artificial
  Synthetically generated peptide
ctgcgcaggaccaagtccgg

SEQ ID NO: 5849 - DNA, 20 bp, Artificial
  Synthetically generated peptide
gctgcgcaggaccaagtccg

SEQ ID NO: 5850 - DNA, 20 bp, Artificial
  Synthetically generated peptide
cgctgcgcaggaccaagtcc

SEQ ID NO: 5851 - DNA, 20 bp, Artificial
  Synthetically generated peptide
ccgctgcgcaggaccaagtc

SEQ ID NO: 5852 - DNA, 20 bp, Artificial
  Synthetically generated peptide
cccgctgcgcaggaccaagt

SEQ ID NO: 5853 - DNA, 20 bp, Artificial
  Synthetically generated peptide
gcccgctgcgcaggaccaag

SEQ ID NO: 5854 - DNA, 20 bp, Artificial
  Synthetically generated peptide
cgcccgctgcgcaggaccaa

SEQ ID NO: 5855 - DNA, 20 bp, Artificial
  Synthetically generated peptide
gcgcccgctgcgcaggacca

SEQ ID NO: 5856 - DNA, 20 bp, Artificial
  Synthetically generated peptide
cgcgcccgctgcgcaggacc

SEQ ID NO: 5857 - DNA, 20 bp, Artificial
  Synthetically generated peptide
ccgcgcccgctgcgcaggac

SEQ ID NO: 5858 - DNA, 20 bp, Artificial
  Synthetically generated peptide
cccgcgcccgctgcgcagga

SEQ ID NO: 5859 - DNA, 20 bp, Artificial
  Synthetically generated peptide
ccccgcgcccgctgcgcagg

SEQ ID NO: 5860 - DNA, 20 bp, Artificial
  Synthetically generated peptide
gccccgcgcccgctgcgcag

SEQ ID NO: 5861 - DNA, 20 bp, Artificial
  Synthetically generated peptide
tgccccgcgcccgctgcgca

SEQ ID NO: 5862 - DNA, 20 bp, Artificial
  Synthetically generated peptide
ctgccccgcgcccgctgcgc

SEQ ID NO: 5863 - DNA, 20 bp, Artificial
  Synthetically generated peptide
gctgccccgcgcccgctgcg

SEQ ID NO: 5864 - DNA, 20 bp, Artificial
  Synthetically generated peptide
cgctgccccgcgcccgctgc

SEQ ID NO: 5865 - DNA, 20 bp, Artificial
  Synthetically generated peptide
gcgctgccccgcgcccgctg

SEQ ID NO: 5866 - DNA, 20 bp, Artificial
  Synthetically generated peptide
tgcgctgccccgcgcccgct

SEQ ID NO: 5867 - DNA, 20 bp, Artificial
  Synthetically generated peptide
ctgcgctgccccgcgcccgc

SEQ ID NO: 5868 - DNA, 20 bp, Artificial
  Synthetically generated peptide
gctgcgctgccccgcgcccg

SEQ ID NO: 5869 - DNA, 20 bp, Artificial
  Synthetically generated peptide
cgctgcgctgccccgcgccc

SEQ ID NO: 5870 - DNA, 20 bp, Artificial
  Synthetically generated peptide
ccgctgcgctgccccgcgcc

SEQ ID NO: 5871 - DNA, 20 bp, Artificial
  Synthetically generated peptide
cccgctgcgctgccccgcgc

SEQ ID NO: 5872 - DNA, 20 bp, Artificial
  Synthetically generated peptide
tcccgctgcgctgccccgcg

SEQ ID NO: 5873 - DNA, 20 bp, Artificial
  Synthetically generated peptide
ctcccgctgcgctgccccgc

SEQ ID NO: 5874 - DNA, 20 bp, Artificial
  Synthetically generated peptide
cctcccgctgcgctgccccg

SEQ ID NO: 5875 - DNA, 20 bp, Artificial
  Synthetically generated peptide
tcctcccgctgcgctgcccc

SEQ ID NO: 5876 - DNA, 20 bp, Artificial
  Synthetically generated peptide
ttcctcccgctgcgctgccc

SEQ ID NO: 5877 - DNA, 20 bp, Artificial
  Synthetically generated peptide
cttcctcccgctgcgctgcc

SEQ ID NO: 5878 - DNA, 20 bp, Artificial
  Synthetically generated peptide
gcttcctcccgctgcgctgc

SEQ ID NO: 5879 - DNA, 20 bp, Artificial
  Synthetically generated peptide
cgcttcctcccgctgcgctg

SEQ ID NO: 5880 - DNA, 20 bp, Artificial
  Synthetically generated peptide
tcgcttcctcccgctgcgct

SEQ ID NO: 5881 - DNA, 20 bp, Artificial
  Synthetically generated peptide
ctcgcttcctcccgctgcgc

SEQ ID NO: 5882 - DNA, 20 bp, Artificial
  Synthetically generated peptide
tctcgcttcctcccgctgcg

SEQ ID NO: 5883 - DNA, 20 bp, Artificial
  Synthetically generated peptide
ctctcgcttcctcccgctgc

SEQ ID NO: 5884 - DNA, 20 bp, Artificial
  Synthetically generated peptide
cctctcgcttcctcccgctg

SEQ ID NO: 5885 - DNA, 20 bp, Artificial
  Synthetically generated peptide
acctctcgcttcctcccgct

SEQ ID NO: 5886 - DNA, 20 bp, Artificial
  Synthetically generated peptide
cacctctcgcttcctcccgc

SEQ ID NO: 5887 - DNA, 20 bp, Artificial
  Synthetically generated peptide
gcacctctcgcttcctcccg

SEQ ID NO: 5888 - DNA, 20 bp, Artificial
  Synthetically generated peptide
agcacctctcgcttcctccc

SEQ ID NO: 5889 - DNA, 20 bp, Artificial
  Synthetically generated peptide
cagcacctctcgcttcctcc

SEQ ID NO: 5890 - DNA, 20 bp, Artificial
  Synthetically generated peptide
gcagcacctctcgcttcctc

SEQ ID NO: 5891 - DNA, 20 bp, Artificial
  Synthetically generated peptide
ggcagcacctctcgcttcct

SEQ ID NO: 5892 - DNA, 20 bp, Artificial
  Synthetically generated peptide
gggcagcacctctcgcttcc

SEQ ID NO: 5893 - DNA, 20 bp, Artificial
  Synthetically generated peptide
agggcagcacctctcgcttc

SEQ ID NO: 5894 - DNA, 20 bp, Artificial
  Synthetically generated peptide
gagggcagcacctctcgctt

SEQ ID NO: 5895 - DNA, 20 bp, Artificial
  Synthetically generated peptide
ggagggcagcacctctcgct

SEQ ID NO: 5896 - DNA, 20 bp, Artificial
  Synthetically generated peptide
gggagggcagcacctctcgc

SEQ ID NO: 5897 - DNA, 20 bp, Artificial
  Synthetically generated peptide
ggggagggcagcacctctcg

SEQ ID NO: 5898 - DNA, 21 bp, Artificial
  Synthetically generated peptide
gcggagcgggctgaacgtgcg

SEQ ID NO: 5899 - DNA, 20 bp, Artificial
  Synthetically generated peptide
cggagcgggctgaacgtgcg

SEQ ID NO: 5900 - DNA, 26 bp, Artificial
  Synthetically generated peptide
gactggaggccgggggaggggcgggg

SEQ ID NO: 5901 - DNA, 23 bp, Artificial
  Synthetically generated peptide
gacccgggtaacgcgcttccaac

SEQ ID NO: 5902 - DNA, 20 bp, Artificial
  Synthetically generated peptide
acccgggtaacgcgcttcca

SEQ ID NO: 5903 - DNA, 20 bp, Artificial
  Synthetically generated peptide
cccgggtaacgcgcttccaa

SEQ ID NO: 5904 - DNA, 20 bp, Artificial
  Synthetically generated peptide
ccgggtaacgcgcttccaac

SEQ ID NO: 5905 - DNA, 20 bp, Artificial
  Synthetically generated peptide
cgggtaacgcgcttccaact

SEQ ID NO: 5906 - DNA, 20 bp, Artificial
  Synthetically generated peptide
gggtaacgcgcttccaactc

SEQ ID NO: 5907 - DNA, 20 bp, Artificial
  Synthetically generated peptide
ggtaacgcgcttccaactcc

SEQ ID NO: 5908 - DNA, 20 bp, Artificial
  Synthetically generated peptide
gtaacgcgcttccaactccg

SEQ ID NO: 5909 - DNA, 20 bp, Artificial
  Synthetically generated peptide
taacgcgcttccaactccgg

SEQ ID NO: 5910 - DNA, 20 bp, Artificial
  Synthetically generated peptide
aacgcgcttccaactccggg

SEQ ID NO: 5911 - DNA, 20 bp, Artificial
  Synthetically generated peptide
acgcgcttccaactccgggg

SEQ ID NO: 5912 - DNA, 20 bp, Artificial
  Synthetically generated peptide
cgcgcttccaactccggggg

SEQ ID NO: 5913 - DNA, 20 bp, Artificial
  Synthetically generated peptide
gcgcttccaactccgggggg

SEQ ID NO: 5914 - DNA, 20 bp, Artificial
  Synthetically generated peptide
cgcttccaactccgggggga

SEQ ID NO: 5915 - DNA, 20 bp, Artificial
  Synthetically generated peptide
gcttccaactccggggggag

SEQ ID NO: 5916 - DNA, 20 bp, Artificial
  Synthetically generated peptide
cttccaactccggggggagg

SEQ ID NO: 5917 - DNA, 20 bp, Artificial
  Synthetically generated peptide
ttccaactccggggggaggg

SEQ ID NO: 5918 - DNA, 20 bp, Artificial
  Synthetically generated peptide
tccaactccggggggagggc

SEQ ID NO: 5919 - DNA, 20 bp, Artificial
  Synthetically generated peptide
ccaactccggggggagggca

SEQ ID NO: 5920 - DNA, 20 bp, Artificial
  Synthetically generated peptide
ggacccgggtaacgcgcttc

SEQ ID NO: 5921 - DNA, 20 bp, Artificial
  Synthetically generated peptide
tggacccgggtaacgcgctt

SEQ ID NO: 5922 - DNA, 20 bp, Artificial
  Synthetically generated peptide
ttggacccgggtaacgcgct

SEQ ID NO: 5923 - DNA, 20 bp, Artificial
  Synthetically generated peptide
tttggacccgggtaacgcgc

SEQ ID NO: 5924 - DNA, 22 bp, Artificial
  Synthetically generated peptide
cactcggctccgcccctattgc

SEQ ID NO: 5925 - DNA, 20 bp, Artificial
  Synthetically generated peptide
actcggctccgcccctattg

SEQ ID NO: 5926 - DNA, 20 bp, Artificial
  Synthetically generated peptide
ctcggctccgcccctattgc

SEQ ID NO: 5927 - DNA, 20 bp, Artificial
  Synthetically generated peptide
tcggctccgcccctattgcc

SEQ ID NO: 5928 - DNA, 20 bp, Artificial
  Synthetically generated peptide
cggctccgcccctattgcct

SEQ ID NO: 5929 - DNA, 20 bp, Artificial
  Synthetically generated peptide
ggctccgcccctattgcctc

SEQ ID NO: 5930 - DNA, 20 bp, Artificial
  Synthetically generated peptide
gctccgcccctattgcctcg

SEQ ID NO: 5931 - DNA, 20 bp, Artificial
  Synthetically generated peptide
ctccgcccctattgcctcgc

SEQ ID NO: 5932 - DNA, 20 bp, Artificial
  Synthetically generated peptide
tccgcccctattgcctcgca

SEQ ID NO: 5933 - DNA, 20 bp, Artificial
  Synthetically generated peptide
ccgcccctattgcctcgcag

SEQ ID NO: 5934 - DNA, 20 bp, Artificial
  Synthetically generated peptide
cgcccctattgcctcgcaga

SEQ ID NO: 5935 - DNA, 20 bp, Artificial
  Synthetically generated peptide
gcccctattgcctcgcagac

SEQ ID NO: 5936 - DNA, 20 bp, Artificial
  Synthetically generated peptide
cccctattgcctcgcagaca

SEQ ID NO: 5937 - DNA, 20 bp, Artificial
  Synthetically generated peptide
ccctattgcctcgcagacaa

SEQ ID NO: 5938 - DNA, 20 bp, Artificial
  Synthetically generated peptide
cctattgcctcgcagacaac

SEQ ID NO: 5939 - DNA, 20 bp, Artificial
  Synthetically generated peptide
ctattgcctcgcagacaacc

SEQ ID NO: 5940 - DNA, 20 bp, Artificial
  Synthetically generated peptide
tattgcctcgcagacaacca

SEQ ID NO: 5941 - DNA, 20 bp, Artificial
  Synthetically generated peptide
attgcctcgcagacaaccaa

SEQ ID NO: 5942 - DNA, 20 bp, Artificial
  Synthetically generated peptide
ttgcctcgcagacaaccaat

SEQ ID NO: 5943 - DNA, 20 bp, Artificial
  Synthetically generated peptide
tgcctcgcagacaaccaatg

SEQ ID NO: 5944 - DNA, 20 bp, Artificial
  Synthetically generated peptide
gcctcgcagacaaccaatgg

SEQ ID NO: 5945 - DNA, 20 bp, Artificial
  Synthetically generated peptide
cctcgcagacaaccaatggg

SEQ ID NO: 5946 - DNA, 20 bp, Artificial
  Synthetically generated peptide
ctcgcagacaaccaatgggg

SEQ ID NO: 5947 - DNA, 20 bp, Artificial
  Synthetically generated peptide
tcgcagacaaccaatggggg

SEQ ID NO: 5948 - DNA, 20 bp, Artificial
  Synthetically generated peptide
cgcagacaaccaatgggggc

SEQ ID NO: 5949 - DNA, 20 bp, Artificial
  Synthetically generated peptide
ccactcggctccgcccctat

SEQ ID NO: 5950 - DNA, 20 bp, Artificial
  Synthetically generated peptide
cccactcggctccgccccta

SEQ ID NO: 5951 - DNA, 20 bp, Artificial
  Synthetically generated peptide
tcccactcggctccgcccct

SEQ ID NO: 5952 - DNA, 20 bp, Artificial
  Synthetically generated peptide
ctcccactcggctccgcccc

SEQ ID NO: 5953 - DNA, 20 bp, Artificial
  Synthetically generated peptide
actcccactcggctccgccc

SEQ ID NO: 5954 - DNA, 20 bp, Artificial
  Synthetically generated peptide
cactcccactcggctccgcc

SEQ ID NO: 5955 - DNA, 20 bp, Artificial
  Synthetically generated peptide
acactcccactcggctccgc

SEQ ID NO: 5956 - DNA, 20 bp, Artificial
  Synthetically generated peptide
cacactcccactcggctccg

SEQ ID NO: 5957 - DNA, 20 bp, Artificial
  Synthetically generated peptide
ccacactcccactcggctcc

SEQ ID NO: 5958 - DNA, 20 bp, Artificial
  Synthetically generated peptide
tccacactcccactcggctc

SEQ ID NO: 5959 - DNA, 20 bp, Artificial
  Synthetically generated peptide
ttccacactcccactcggct

SEQ ID NO: 5960 - DNA, 20 bp, Artificial
  Synthetically generated peptide
tttccacactcccactcggc

SEQ ID NO: 5961 - DNA, 20 bp, Artificial
  Synthetically generated peptide
ctttccacactcccactcgg

SEQ ID NO: 5962 - DNA, 20 bp, Artificial
  Synthetically generated peptide
gctttccacactcccactcg

SEQ ID NO: 5963 - DNA, 20 bp, Artificial
  Synthetically generated peptide
cgctttccacactcccactc

SEQ ID NO: 5964 - DNA, 20 bp, Artificial
  Synthetically generated peptide
gcgctttccacactcccact

SEQ ID NO: 5965 - DNA, 20 bp, Artificial
  Synthetically generated peptide
ggcgctttccacactcccac

SEQ ID NO: 5966 - DNA, 20 bp, Artificial
  Synthetically generated peptide
cggcgctttccacactccca

SEQ ID NO: 5967 - DNA, 20 bp, Artificial
  Synthetically generated peptide
gcggcgctttccacactccc

SEQ ID NO: 5968 - DNA, 20 bp, Artificial
  Synthetically generated peptide
tgcggcgctttccacactcc

SEQ ID NO: 5969 - DNA, 20 bp, Artificial
  Synthetically generated peptide
atgcggcgctttccacactc

SEQ ID NO: 5970 - DNA, 20 bp, Artificial
  Synthetically generated peptide
gatgcggcgctttccacact

SEQ ID NO: 5971 - DNA, 20 bp, Artificial
  Synthetically generated peptide
ggatgcggcgctttccacac

SEQ ID NO: 5972 - DNA, 20 bp, Artificial
  Synthetically generated peptide
gggatgcggcgctttccaca

SEQ ID NO: 5973 - DNA, 20 bp, Artificial
  Synthetically generated peptide
cgggatgcggcgctttccac

SEQ ID NO: 5974 - DNA, 20 bp, Artificial
  Synthetically generated peptide
ccgggatgcggcgctttcca

SEQ ID NO: 5975 - DNA, 20 bp, Artificial
  Synthetically generated peptide
cccgggatgcggcgctttcc

SEQ ID NO: 5976 - DNA, 20 bp, Artificial
  Synthetically generated peptide
acccgggatgcggcgctttc

SEQ ID NO: 5977 - DNA, 20 bp, Artificial
  Synthetically generated peptide
cacccgggatgcggcgcttt

SEQ ID NO: 5978 - DNA, 20 bp, Artificial
  Synthetically generated peptide
ccacccgggatgcggcgctt

SEQ ID NO: 5979 - DNA, 20 bp, Artificial
  Synthetically generated peptide
cccacccgggatgcggcgct

SEQ ID NO: 5980 - DNA, 20 bp, Artificial
  Synthetically generated peptide
tcccacccgggatgcggcgc

SEQ ID NO: 5981 - DNA, 20 bp, Artificial
  Synthetically generated peptide
ctcccacccgggatgcggcg

SEQ ID NO: 5982 - DNA, 20 bp, Artificial
  Synthetically generated peptide
cctcccacccgggatgcggc

SEQ ID NO: 5983 - DNA, 20 bp, Artificial
  Synthetically generated peptide
gcctcccacccgggatgcgg

SEQ ID NO: 5984 - DNA, 20 bp, Artificial
  Synthetically generated peptide
cgcctcccacccgggatgcg

SEQ ID NO: 5985 - DNA, 20 bp, Artificial
  Synthetically generated peptide
tcgcctcccacccgggatgc

SEQ ID NO: 5986 - DNA, 20 bp, Artificial
  Synthetically generated peptide
ctcgcctcccacccgggatg

SEQ ID NO: 5987 - DNA, 20 bp, Artificial
  Synthetically generated peptide
cctcgcctcccacccgggat

SEQ ID NO: 5988 - DNA, 20 bp, Artificial
  Synthetically generated peptide
gcctcgcctcccacccggga

SEQ ID NO: 5989 - DNA, 20 bp, Artificial
  Synthetically generated peptide
agcctcgcctcccacccggg

SEQ ID NO: 5990 - DNA, 20 bp, Artificial
  Synthetically generated peptide
aagcctcgcctcccacccgg

SEQ ID NO: 5991 - DNA, 20 bp, Artificial
  Synthetically generated peptide
gaagcctcgcctcccacccg

SEQ ID NO: 5992 - DNA, 20 bp, Artificial
  Synthetically generated peptide
ggaagcctcgcctcccaccc

SEQ ID NO: 5993 - DNA, 20 bp, Artificial
  Synthetically generated peptide
gggaagcctcgcctcccacc

SEQ ID NO: 5994 - DNA, 20 bp, Artificial
  Synthetically generated peptide
ggggaagcctcgcctcccac

SEQ ID NO: 5995 - DNA, 20 bp, Artificial
  Synthetically generated peptide
aggggaagcctcgcctccca

SEQ ID NO: 5996 - DNA, 20 bp, Artificial
  Synthetically generated peptide
aaggggaagcctcgcctccc

SEQ ID NO: 5997 - DNA, 20 bp, Artificial
  Synthetically generated peptide
gaaggggaagcctcgcctcc

SEQ ID NO: 5998 - DNA, 20 bp, Artificial
  Synthetically generated peptide
ggaaggggaagcctcgcctc

SEQ ID NO: 5999 - DNA, 20 bp, Artificial
  Synthetically generated peptide
gggaaggggaagcctcgcct

SEQ ID NO: 6000 - DNA, 23 bp, Artificial
  Synthetically generated peptide
tacgtcacgggagcgcggcgcac

SEQ ID NO: 6001 - DNA, 20 bp, Artificial
  Synthetically generated peptide
acgtcacgggagcgcggcgc

SEQ ID NO: 6002 - DNA, 20 bp, Artificial
  Synthetically generated peptide
cgtcacgggagcgcggcgca

SEQ ID NO: 6003 - DNA, 20 bp, Artificial
  Synthetically generated peptide
gtcacgggagcgcggcgcac

SEQ ID NO: 6004 - DNA, 20 bp, Artificial
  Synthetically generated peptide
tcacgggagcgcggcgcact

SEQ ID NO: 6005 - DNA, 20 bp, Artificial
  Synthetically generated peptide
cacgggagcgcggcgcactg

SEQ ID NO: 6006 - DNA, 20 bp, Artificial
  Synthetically generated peptide
acgggagcgcggcgcactgc

SEQ ID NO: 6007 - DNA, 20 bp, Artificial
  Synthetically generated peptide
cgggagcgcggcgcactgcc

SEQ ID NO: 6008 - DNA, 20 bp, Artificial
  Synthetically generated peptide
gggagcgcggcgcactgcct

SEQ ID NO: 6009 - DNA, 20 bp, Artificial
  Synthetically generated peptide
ggagcgcggcgcactgcctg

SEQ ID NO: 6010 - DNA, 20 bp, Artificial
  Synthetically generated peptide
gagcgcggcgcactgcctgg

SEQ ID NO: 6011 - DNA, 20 bp, Artificial
  Synthetically generated peptide
agcgcggcgcactgcctggg

SEQ ID NO: 6012 - DNA, 20 bp, Artificial
  Synthetically generated peptide
gcgcggcgcactgcctgggg

SEQ ID NO: 6013 - DNA, 20 bp, Artificial
  Synthetically generated peptide
cgcggcgcactgcctggggg

SEQ ID NO: 6014 - DNA, 20 bp, Artificial
  Synthetically generated peptide
gcggcgcactgcctgggggc

SEQ ID NO: 6015 - DNA, 20 bp, Artificial
  Synthetically generated peptide
cggcgcactgcctgggggcg

SEQ ID NO: 6016 - DNA, 20 bp, Artificial
  Synthetically generated peptide
ggcgcactgcctgggggcgg

SEQ ID NO: 6017 - DNA, 20 bp, Artificial
  Synthetically generated peptide
gcgcactgcctgggggcggg

SEQ ID NO: 6018 - DNA, 20 bp, Artificial
  Synthetically generated peptide
cgcactgcctgggggcgggg

SEQ ID NO: 6019 - DNA, 20 bp, Artificial
  Synthetically generated peptide
gcactgcctgggggcggggt

SEQ ID NO: 6020 - DNA, 20 bp, Artificial
  Synthetically generated peptide
cactgcctgggggcggggtc

SEQ ID NO: 6021 - DNA, 20 bp, Artificial
  Synthetically generated peptide
actgcctgggggcggggtcc

SEQ ID NO: 6022 - DNA, 20 bp, Artificial
  Synthetically generated peptide
ctgcctgggggcggggtccg

SEQ ID NO: 6023 - DNA, 20 bp, Artificial
  Synthetically generated peptide
tgcctgggggcggggtccgt

SEQ ID NO: 6024 - DNA, 20 bp, Artificial
  Synthetically generated peptide
gcctgggggcggggtccgtc

SEQ ID NO: 6025 - DNA, 20 bp, Artificial
  Synthetically generated peptide
cctgggggcggggtccgtcg

SEQ ID NO: 6026 - DNA, 20 bp, Artificial
  Synthetically generated peptide
ctgggggcggggtccgtcgc

SEQ ID NO: 6027 - DNA, 20 bp, Artificial
  Synthetically generated peptide
tgggggcggggtccgtcgcg

SEQ ID NO: 6028 - DNA, 20 bp, Artificial
  Synthetically generated peptide
gggggcggggtccgtcgcgg

SEQ ID NO: 6029 - DNA, 20 bp, Artificial
  Synthetically generated peptide
ggggcggggtccgtcgcgga

SEQ ID NO: 6030 - DNA, 20 bp, Artificial
  Synthetically generated peptide
gggcggggtccgtcgcggac

SEQ ID NO: 6031 - DNA, 20 bp, Artificial
  Synthetically generated peptide
ggcggggtccgtcgcggacg

SEQ ID NO: 6032 - DNA, 20 bp, Artificial
  Synthetically generated peptide
gcggggtccgtcgcggacgc

SEQ ID NO: 6033 - DNA, 20 bp, Artificial
  Synthetically generated peptide
cggggtccgtcgcggacgcc

SEQ ID NO: 6034 - DNA, 20 bp, Artificial
  Synthetically generated peptide
ggggtccgtcgcggacgccg

SEQ ID NO: 6035 - DNA, 20 bp, Artificial
  Synthetically generated peptide
gggtccgtcgcggacgccgt

SEQ ID NO: 6036 - DNA, 20 bp, Artificial
  Synthetically generated peptide
ggtccgtcgcggacgccgtg

SEQ ID NO: 6037 - DNA, 20 bp, Artificial
  Synthetically generated peptide
gtccgtcgcggacgccgtgg

SEQ ID NO: 6038 - DNA, 20 bp, Artificial
  Synthetically generated peptide
tccgtcgcggacgccgtggc

SEQ ID NO: 6039 - DNA, 20 bp, Artificial
  Synthetically generated peptide
ccgtcgcggacgccgtggcg

SEQ ID NO: 6040 - DNA, 20 bp, Artificial
  Synthetically generated peptide
cgtcgcggacgccgtggcgc

SEQ ID NO: 6041 - DNA, 20 bp, Artificial
  Synthetically generated peptide
gtcgcggacgccgtggcgcc

SEQ ID NO: 6042 - DNA, 20 bp, Artificial
  Synthetically generated peptide
tcgcggacgccgtggcgccc

SEQ ID NO: 6043 - DNA, 20 bp, Artificial
  Synthetically generated peptide
cgcggacgccgtggcgccct

SEQ ID NO: 6044 - DNA, 20 bp, Artificial
  Synthetically generated peptide
gcggacgccgtggcgccctc

SEQ ID NO: 6045 - DNA, 20 bp, Artificial
  Synthetically generated peptide
cggacgccgtggcgccctct

SEQ ID NO: 6046 - DNA, 20 bp, Artificial
  Synthetically generated peptide
ggacgccgtggcgccctctg

SEQ ID NO: 6047 - DNA, 20 bp, Artificial
  Synthetically generated peptide
gacgccgtggcgccctctgt

SEQ ID NO: 6048 - DNA, 20 bp, Artificial
  Synthetically generated peptide
acgccgtggcgccctctgtc

SEQ ID NO: 6049 - DNA, 20 bp, Artificial
  Synthetically generated peptide
cgccgtggcgccctctgtcg

SEQ ID NO: 6050 - DNA, 20 bp, Artificial
  Synthetically generated peptide
gccgtggcgccctctgtcgc

SEQ ID NO: 6051 - DNA, 20 bp, Artificial
  Synthetically generated peptide
ccgtggcgccctctgtcgcc

SEQ ID NO: 6052 - DNA, 20 bp, Artificial
  Synthetically generated peptide
cgtggcgccctctgtcgccc

SEQ ID NO: 6053 - DNA, 20 bp, Artificial
  Synthetically generated peptide
gtggcgccctctgtcgcccc

SEQ ID NO: 6054 - DNA, 20 bp, Artificial
  Synthetically generated peptide
tggcgccctctgtcgccccg

SEQ ID NO: 6055 - DNA, 20 bp, Artificial
  Synthetically generated peptide
ggcgccctctgtcgccccga

SEQ ID NO: 6056 - DNA, 20 bp, Artificial
  Synthetically generated peptide
gcgccctctgtcgccccgag

SEQ ID NO: 6057 - DNA, 20 bp, Artificial
  Synthetically generated peptide
cgccctctgtcgccccgagg

SEQ ID NO: 6058 - DNA, 20 bp, Artificial
  Synthetically generated peptide
gccctctgtcgccccgaggc

SEQ ID NO: 6059 - DNA, 20 bp, Artificial
  Synthetically generated peptide
ccctctgtcgccccgaggca

SEQ ID NO: 6060 - DNA, 20 bp, Artificial
  Synthetically generated peptide
cctctgtcgccccgaggcaa

SEQ ID NO: 6061 - DNA, 20 bp, Artificial
  Synthetically generated peptide
ctctgtcgccccgaggcaag

SEQ ID NO: 6062 - DNA, 20 bp, Artificial
  Synthetically generated peptide
tctgtcgccccgaggcaagc

SEQ ID NO: 6063 - DNA, 20 bp, Artificial
  Synthetically generated peptide
ctgtcgccccgaggcaagca

SEQ ID NO: 6064 - DNA, 20 bp, Artificial
  Synthetically generated peptide
tgtcgccccgaggcaagcag

SEQ ID NO: 6065 - DNA, 20 bp, Artificial
  Synthetically generated peptide
gtcgccccgaggcaagcagg

SEQ ID NO: 6066 - DNA, 20 bp, Artificial
  Synthetically generated peptide
tcgccccgaggcaagcaggt

SEQ ID NO: 6067 - DNA, 20 bp, Artificial
  Synthetically generated peptide
cgccccgaggcaagcaggtg

SEQ ID NO: 6068 - DNA, 20 bp, Artificial
  Synthetically generated peptide
gccccgaggcaagcaggtgg

SEQ ID NO: 6069 - DNA, 20 bp, Artificial
  Synthetically generated peptide
ccccgaggcaagcaggtgga

SEQ ID NO: 6070 - DNA, 20 bp, Artificial
  Synthetically generated peptide
cccgaggcaagcaggtggac

SEQ ID NO: 6071 - DNA, 20 bp, Artificial
  Synthetically generated peptide
ccgaggcaagcaggtggacc

SEQ ID NO: 6072 - DNA, 20 bp, Artificial
  Synthetically generated peptide
cgaggcaagcaggtggaccc

SEQ ID NO: 6073 - DNA, 20 bp, Artificial
  Synthetically generated peptide
atacgtcacgggagcgcggc

SEQ ID NO: 6074 - DNA, 20 bp, Artificial
  Synthetically generated peptide
aatacgtcacgggagcgcgg

SEQ ID NO: 6075 - DNA, 20 bp, Artificial
  Synthetically generated peptide
aaatacgtcacgggagcgcg

SEQ ID NO: 6076 - DNA, 20 bp, Artificial
  Synthetically generated peptide
gaaatacgtcacgggagcgc

SEQ ID NO: 6077 - DNA, 27 bp, Artificial
  Synthetically generated peptide
gtcgcggacgccgtggcgccctctgtc

SEQ ID NO: 6078 - DNA, 20 bp, Artificial
  Synthetically generated peptide
tcgcggacgccgtggcgccc

SEQ ID NO: 6079 - DNA, 20 bp, Artificial
  Synthetically generated peptide
cgcggacgccgtggcgccct

SEQ ID NO: 6080 - DNA, 20 bp, Artificial
  Synthetically generated peptide
gcggacgccgtggcgccctc

SEQ ID NO: 6081 - DNA, 20 bp, Artificial
  Synthetically generated peptide
cggacgccgtggcgccctct

SEQ ID NO: 6082 - DNA, 20 bp, Artificial
  Synthetically generated peptide
ggacgccgtggcgccctctg

SEQ ID NO: 6083 - DNA, 20 bp, Artificial
  Synthetically generated peptide
gacgccgtggcgccctctgt

SEQ ID NO: 6084 - DNA, 20 bp, Artificial
  Synthetically generated peptide
acgccgtggcgccctctgtc

SEQ ID NO: 6085 - DNA, 20 bp, Artificial
  Synthetically generated peptide
cgccgtggcgccctctgtcg

SEQ ID NO: 6086 - DNA, 20 bp, Artificial
  Synthetically generated peptide
gccgtggcgccctctgtcgc

SEQ ID NO: 6087 - DNA, 20 bp, Artificial
  Synthetically generated peptide
ccgtggcgccctctgtcgcc

SEQ ID NO: 6088 - DNA, 20 bp, Artificial
  Synthetically generated peptide
cgtggcgccctctgtcgccc

SEQ ID NO: 6089 - DNA, 20 bp, Artificial
  Synthetically generated peptide
gtggcgccctctgtcgcccc

SEQ ID NO: 6090 - DNA, 20 bp, Artificial
  Synthetically generated peptide
tggcgccctctgtcgccccg

SEQ ID NO: 6091 - DNA, 20 bp, Artificial
  Synthetically generated peptide
ggcgccctctgtcgccccga

SEQ ID NO: 6092 - DNA, 20 bp, Artificial
  Synthetically generated peptide
gcgccctctgtcgccccgag

SEQ ID NO: 6093 - DNA, 20 bp, Artificial
  Synthetically generated peptide
cgccctctgtcgccccgagg

SEQ ID NO: 6094 - DNA, 20 bp, Artificial
  Synthetically generated peptide
gccctctgtcgccccgaggc

SEQ ID NO: 6095 - DNA, 20 bp, Artificial
  Synthetically generated peptide
ccctctgtcgccccgaggca

SEQ ID NO: 6096 - DNA, 20 bp, Artificial
  Synthetically generated peptide
cctctgtcgccccgaggcaa

SEQ ID NO: 6097 - DNA, 20 bp, Artificial
  Synthetically generated peptide
ctctgtcgccccgaggcaag

SEQ ID NO: 6098 - DNA, 20 bp, Artificial
  Synthetically generated peptide
tctgtcgccccgaggcaagc

SEQ ID NO: 6099 - DNA, 20 bp, Artificial
  Synthetically generated peptide
ctgtcgccccgaggcaagca

SEQ ID NO: 6100 - DNA, 20 bp, Artificial
  Synthetically generated peptide
tgtcgccccgaggcaagcag

SEQ ID NO: 6101 - DNA, 20 bp, Artificial
  Synthetically generated peptide
gtcgccccgaggcaagcagg

SEQ ID NO: 6102 - DNA, 20 bp, Artificial
  Synthetically generated peptide
tcgccccgaggcaagcaggt

SEQ ID NO: 6103 - DNA, 20 bp, Artificial
  Synthetically generated peptide
cgccccgaggcaagcaggtg

SEQ ID NO: 6104 - DNA, 20 bp, Artificial
  Synthetically generated peptide
gccccgaggcaagcaggtgg

SEQ ID NO: 6105 - DNA, 20 bp, Artificial
  Synthetically generated peptide
ccccgaggcaagcaggtgga

SEQ ID NO: 6106 - DNA, 20 bp, Artificial
  Synthetically generated peptide
cccgaggcaagcaggtggac

SEQ ID NO: 6107 - DNA, 20 bp, Artificial
  Synthetically generated peptide
ccgaggcaagcaggtggacc

SEQ ID NO: 6108 - DNA, 20 bp, Artificial
  Synthetically generated peptide
cgaggcaagcaggtggaccc

SEQ ID NO: 6109 - DNA, 20 bp, Artificial
  Synthetically generated peptide
cgtcgcggacgccgtggcgc

SEQ ID NO: 6110 - DNA, 20 bp, Artificial
  Synthetically generated peptide
ccgtcgcggacgccgtggcg

SEQ ID NO: 6111 - DNA, 20 bp, Artificial
  Synthetically generated peptide
tccgtcgcggacgccgtggc

SEQ ID NO: 6112 - DNA, 20 bp, Artificial
  Synthetically generated peptide
gtccgtcgcggacgccgtgg

SEQ ID NO: 6113 - DNA, 20 bp, Artificial
  Synthetically generated peptide
ggtccgtcgcggacgccgtg

SEQ ID NO: 6114 - DNA, 20 bp, Artificial
  Synthetically generated peptide
gggtccgtcgcggacgccgt

SEQ ID NO: 6115 - DNA, 20 bp, Artificial
  Synthetically generated peptide
ggggtccgtcgcggacgccg

SEQ ID NO: 6116 - DNA, 20 bp, Artificial
  Synthetically generated peptide
cggggtccgtcgcggacgcc

SEQ ID NO: 6117 - DNA, 20 bp, Artificial
  Synthetically generated peptide
gcggggtccgtcgcggacgc

SEQ ID NO: 6118 - DNA, 20 bp, Artificial
  Synthetically generated peptide
ggcggggtccgtcgcggacg

SEQ ID NO: 6119 - DNA, 20 bp, Artificial
  Synthetically generated peptide
gggcggggtccgtcgcggac

SEQ ID NO: 6120 - DNA, 20 bp, Artificial
  Synthetically generated peptide
ggggcggggtccgtcgcgga

SEQ ID NO: 6121 - DNA, 20 bp, Artificial
  Synthetically generated peptide
gggggcggggtccgtcgcgg

SEQ ID NO: 6122 - DNA, 20 bp, Artificial
  Synthetically generated peptide
tgggggcggggtccgtcgcg

SEQ ID NO: 6123 - DNA, 20 bp, Artificial
  Synthetically generated peptide
ctgggggcggggtccgtcgc

SEQ ID NO: 6124 - DNA, 20 bp, Artificial
  Synthetically generated peptide
cctgggggcggggtccgtcg

SEQ ID NO: 6125 - DNA, 20 bp, Artificial
  Synthetically generated peptide
gcctgggggcggggtccgtc

SEQ ID NO: 6126 - DNA, 20 bp, Artificial
  Synthetically generated peptide
tgcctgggggcggggtccgt

SEQ ID NO: 6127 - DNA, 20 bp, Artificial
  Synthetically generated peptide
ctgcctgggggcggggtccg

SEQ ID NO: 6128 - DNA, 20 bp, Artificial
  Synthetically generated peptide
actgcctgggggcggggtcc

SEQ ID NO: 6129 - DNA, 20 bp, Artificial
  Synthetically generated peptide
cactgcctgggggcggggtc

SEQ ID NO: 6130 - DNA, 20 bp, Artificial
  Synthetically generated peptide
gcactgcctgggggcggggt

SEQ ID NO: 6131 - DNA, 20 bp, Artificial
  Synthetically generated peptide
cgcactgcctgggggcgggg

SEQ ID NO: 6132 - DNA, 20 bp, Artificial
  Synthetically generated peptide
gcgcactgcctgggggcggg

SEQ ID NO: 6133 - DNA, 20 bp, Artificial
  Synthetically generated peptide
ggcgcactgcctgggggcgg

SEQ ID NO: 6134 - DNA, 20 bp, Artificial
  Synthetically generated peptide
cggcgcactgcctgggggcg

SEQ ID NO: 6135 - DNA, 20 bp, Artificial
  Synthetically generated peptide
gcggcgcactgcctgggggc

SEQ ID NO: 6136 - DNA, 20 bp, Artificial
  Synthetically generated peptide
cgcggcgcactgcctggggg

SEQ ID NO: 6137 - DNA, 20 bp, Artificial
  Synthetically generated peptide
gcgcggcgcactgcctgggg

SEQ ID NO: 6138 - DNA, 20 bp, Artificial
  Synthetically generated peptide
agcgcggcgcactgcctggg

SEQ ID NO: 6139 - DNA, 20 bp, Artificial
  Synthetically generated peptide
gagcgcggcgcactgcctgg

SEQ ID NO: 6140 - DNA, 20 bp, Artificial
  Synthetically generated peptide
ggagcgcggcgcactgcctg

SEQ ID NO: 6141 - DNA, 20 bp, Artificial
  Synthetically generated peptide
gggagcgcggcgcactgcct

SEQ ID NO: 6142 - DNA, 20 bp, Artificial
  Synthetically generated peptide
cgggagcgcggcgcactgcc

SEQ ID NO: 6143 - DNA, 20 bp, Artificial
  Synthetically generated peptide
acgggagcgcggcgcactgc

SEQ ID NO: 6144 - DNA, 20 bp, Artificial
  Synthetically generated peptide
cacgggagcgcggcgcactg

SEQ ID NO: 6145 - DNA, 20 bp, Artificial
  Synthetically generated peptide
tcacgggagcgcggcgcact

SEQ ID NO: 6146 - DNA, 20 bp, Artificial
  Synthetically generated peptide
gtcacgggagcgcggcgcac

SEQ ID NO: 6147 - DNA, 20 bp, Artificial
  Synthetically generated peptide
cgtcacgggagcgcggcgca

SEQ ID NO: 6148 - DNA, 20 bp, Artificial
  Synthetically generated peptide
acgtcacgggagcgcggcgc

SEQ ID NO: 6149 - DNA, 20 bp, Artificial
  Synthetically generated peptide
tacgtcacgggagcgcggcg

SEQ ID NO: 6150 - DNA, 20 bp, Artificial
  Synthetically generated peptide
atacgtcacgggagcgcggc

SEQ ID NO: 6151 - DNA, 20 bp, Artificial
  Synthetically generated peptide
aatacgtcacgggagcgcgg

SEQ ID NO: 6152 - DNA, 20 bp, Artificial
  Synthetically generated peptide
aaatacgtcacgggagcgcg

SEQ ID NO: 6153 - DNA, 20 bp, Artificial
  Synthetically generated peptide
gaaatacgtcacgggagcgc

SEQ ID NO: 6154 - DNA, 23 bp, Artificial
  Synthetically generated peptide
cactcgccgtcatgcccggatcc

SEQ ID NO: 6155 - DNA, 20 bp, Artificial
  Synthetically generated peptide
actcgccgtcatgcccggat

SEQ ID NO: 6156 - DNA, 20 bp, Artificial
  Synthetically generated peptide
ctcgccgtcatgcccggatc

SEQ ID NO: 6157 - DNA, 20 bp, Artificial
  Synthetically generated peptide
tcgccgtcatgcccggatcc

SEQ ID NO: 6158 - DNA, 20 bp, Artificial
  Synthetically generated peptide
cgccgtcatgcccggatcct

SEQ ID NO: 6159 - DNA, 20 bp, Artificial
  Synthetically generated peptide
gccgtcatgcccggatcctt

SEQ ID NO: 6160 - DNA, 20 bp, Artificial
  Synthetically generated peptide
ccgtcatgcccggatccttt

SEQ ID NO: 6161 - DNA, 20 bp, Artificial
  Synthetically generated peptide
cgtcatgcccggatcctttt

SEQ ID NO: 6162 - DNA, 20 bp, Artificial
  Synthetically generated peptide
gtcatgcccggatccttttt

SEQ ID NO: 6163 - DNA, 20 bp, Artificial
  Synthetically generated peptide
tcatgcccggatcctttttg

SEQ ID NO: 6164 - DNA, 20 bp, Artificial
  Synthetically generated peptide
catgcccggatcctttttgt

SEQ ID NO: 6165 - DNA, 20 bp, Artificial
  Synthetically generated peptide
atgcccggatcctttttgta

SEQ ID NO: 6166 - DNA, 20 bp, Artificial
  Synthetically generated peptide
tgcccggatcctttttgtat

SEQ ID NO: 6167 - DNA, 20 bp, Artificial
  Synthetically generated peptide
gcccggatcctttttgtatt

SEQ ID NO: 6168 - DNA, 20 bp, Artificial
  Synthetically generated peptide
gcactcgccgtcatgcccgg

SEQ ID NO: 6169 - DNA, 20 bp, Artificial
  Synthetically generated peptide
ggcactcgccgtcatgcccg

SEQ ID NO: 6170 - DNA, 20 bp, Artificial
  Synthetically generated peptide
aggcactcgccgtcatgccc

SEQ ID NO: 6171 - DNA, 20 bp, Artificial
  Synthetically generated peptide
caggcactcgccgtcatgcc

SEQ ID NO: 6172 - DNA, 20 bp, Artificial
  Synthetically generated peptide
acaggcactcgccgtcatgc

SEQ ID NO: 6173 - DNA, 20 bp, Artificial
  Synthetically generated peptide
tacaggcactcgccgtcatg

SEQ ID NO: 6174 - DNA, 20 bp, Artificial
  Synthetically generated peptide
ttacaggcactcgccgtcat

SEQ ID NO: 6175 - DNA, 20 bp, Artificial
  Synthetically generated peptide
attacaggcactcgccgtca

SEQ ID NO: 6176 - DNA, 20 bp, Artificial
  Synthetically generated peptide
gattacaggcactcgccgtc

SEQ ID NO: 6177 - DNA, 20 bp, Artificial
  Synthetically generated peptide
ggattacaggcactcgccgt

SEQ ID NO: 6178 - DNA, 20 bp, Artificial
  Synthetically generated peptide
gggattacaggcactcgccg

SEQ ID NO: 6179 - DNA, 20 bp, Artificial
  Synthetically generated peptide
tgggattacaggcactcgcc

SEQ ID NO: 6180 - DNA, 20 bp, Artificial
  Synthetically generated peptide
ctgggattacaggcactcgc

SEQ ID NO: 6181 - DNA, 20 bp, Artificial
  Synthetically generated peptide
gctgggattacaggcactcg

SEQ ID NO: 6182 - DNA, 23 bp, Artificial
  Synthetically generated peptide
cgccgcagcccgagtccgagagg

SEQ ID NO: 6183 - DNA, 20 bp, Artificial
  Synthetically generated peptide
gccgcagcccgagtccgaga

SEQ ID NO: 6184 - DNA, 20 bp, Artificial
  Synthetically generated peptide
ccgcagcccgagtccgagag

SEQ ID NO: 6185 - DNA, 20 bp, Artificial
  Synthetically generated peptide
cgcagcccgagtccgagagg

SEQ ID NO: 6186 - DNA, 20 bp, Artificial
  Synthetically generated peptide
gcagcccgagtccgagaggc

SEQ ID NO: 6187 - DNA, 20 bp, Artificial
  Synthetically generated peptide
cagcccgagtccgagaggca

SEQ ID NO: 6188 - DNA, 20 bp, Artificial
  Synthetically generated peptide
agcccgagtccgagaggcag

SEQ ID NO: 6189 - DNA, 20 bp, Artificial
  Synthetically generated peptide
gcccgagtccgagaggcagg

SEQ ID NO: 6190 - DNA, 20 bp, Artificial
  Synthetically generated peptide
cccgagtccgagaggcaggg

SEQ ID NO: 6191 - DNA, 20 bp, Artificial
  Synthetically generated peptide
acgccgcagcccgagtccga

SEQ ID NO: 6192 - DNA, 20 bp, Artificial
  Synthetically generated peptide
gacgccgcagcccgagtccg

SEQ ID NO: 6193 - DNA, 20 bp, Artificial
  Synthetically generated peptide
tgacgccgcagcccgagtcc

SEQ ID NO: 6194 - DNA, 20 bp, Artificial
  Synthetically generated peptide
ctgacgccgcagcccgagtc

SEQ ID NO: 6195 - DNA, 20 bp, Artificial
  Synthetically generated peptide
gctgacgccgcagcccgagt

SEQ ID NO: 6196 - DNA, 20 bp, Artificial
  Synthetically generated peptide
ggctgacgccgcagcccgag

SEQ ID NO: 6197 - DNA, 20 bp, Artificial
  Synthetically generated peptide
aggctgacgccgcagcccga

SEQ ID NO: 6198 - DNA, 20 bp, Artificial
  Synthetically generated peptide
aaggctgacgccgcagcccg

SEQ ID NO: 6199 - DNA, 20 bp, Artificial
  Synthetically generated peptide
gaaggctgacgccgcagccc

SEQ ID NO: 6200 - DNA, 20 bp, Artificial
  Synthetically generated peptide
agaaggctgacgccgcagcc

SEQ ID NO: 6201 - DNA, 20 bp, Artificial
  Synthetically generated peptide
aagaaggctgacgccgcagc

SEQ ID NO: 6202 - DNA, 26 bp, Artificial
  Synthetically generated peptide
gaggggcgctggggctgaggcgagcg

SEQ ID NO: 6203 - DNA, 27 bp, Artificial
  Synthetically generated peptide
ctcgcgataacgggatcgggagccgcg

SEQ ID NO: 6204 - DNA, 20 bp, Artificial
  Synthetically generated peptide
tcgcgataacgggatcggga

SEQ ID NO: 6205 - DNA, 20 bp, Artificial
  Synthetically generated peptide
tctcgcgataacgggatcgg

SEQ ID NO: 6206 - DNA, 20 bp, Artificial
  Synthetically generated peptide
ttctcgcgataacgggatcg

SEQ ID NO: 6207 - DNA, 20 bp, Artificial
  Synthetically generated peptide
cttctcgcgataacgggatc

SEQ ID NO: 6208 - DNA, 20 bp, Artificial
  Synthetically generated peptide
gcttctcgcgataacgggat

SEQ ID NO: 6209 - DNA, 20 bp, Artificial
  Synthetically generated peptide
ggcttctcgcgataacggga

SEQ ID NO: 6210 - DNA, 20 bp, Artificial
  Synthetically generated peptide
cggcttctcgcgataacggg

SEQ ID NO: 6211 - DNA, 20 bp, Artificial
  Synthetically generated peptide
ccggcttctcgcgataacgg

SEQ ID NO: 6212 - DNA, 20 bp, Artificial
  Synthetically generated peptide
accggcttctcgcgataacg

SEQ ID NO: 6213 - DNA, 20 bp, Artificial
  Synthetically generated peptide
gaccggcttctcgcgataac

SEQ ID NO: 6214 - DNA, 20 bp, Artificial
  Synthetically generated peptide
ggaccggcttctcgcgataa

SEQ ID NO: 6215 - DNA, 20 bp, Artificial
  Synthetically generated peptide
cggaccggcttctcgcgata

SEQ ID NO: 6216 - DNA, 20 bp, Artificial
  Synthetically generated peptide
gcggaccggcttctcgcgat

SEQ ID NO: 6217 - DNA, 20 bp, Artificial
  Synthetically generated peptide
cgcggaccggcttctcgcga

SEQ ID NO: 6218 - DNA, 20 bp, Artificial
  Synthetically generated peptide
tcgcggaccggcttctcgcg

SEQ ID NO: 6219 - DNA, 20 bp, Artificial
  Synthetically generated peptide
atcgcggaccggcttctcgc

SEQ ID NO: 6220 - DNA, 20 bp, Artificial
  Synthetically generated peptide
gatcgcggaccggcttctcg

SEQ ID NO: 6221 - DNA, 20 bp, Artificial
  Synthetically generated peptide
agatcgcggaccggcttctc

SEQ ID NO: 6222 - DNA, 20 bp, Artificial
  Synthetically generated peptide
aagatcgcggaccggcttct

SEQ ID NO: 6223 - DNA, 20 bp, Artificial
  Synthetically generated peptide
caagatcgcggaccggcttc

SEQ ID NO: 6224 - DNA, 20 bp, Artificial
  Synthetically generated peptide
acaagatcgcggaccggctt

SEQ ID NO: 6225 - DNA, 20 bp, Artificial
  Synthetically generated peptide
cacaagatcgcggaccggct

SEQ ID NO: 6226 - DNA, 20 bp, Artificial
  Synthetically generated peptide
ccacaagatcgcggaccggc

SEQ ID NO: 6227 - DNA, 20 bp, Artificial
  Synthetically generated peptide
gccacaagatcgcggaccgg

SEQ ID NO: 6228 - DNA, 20 bp, Artificial
  Synthetically generated peptide
ggccacaagatcgcggaccg

SEQ ID NO: 6229 - DNA, 20 bp, Artificial
  Synthetically generated peptide
cggccacaagatcgcggacc

SEQ ID NO: 6230 - DNA, 20 bp, Artificial
  Synthetically generated peptide
gcggccacaagatcgcggac

SEQ ID NO: 6231 - DNA, 20 bp, Artificial
  Synthetically generated peptide
ggcggccacaagatcgcgga

SEQ ID NO: 6232 - DNA, 20 bp, Artificial
  Synthetically generated peptide
gggcggccacaagatcgcgg

SEQ ID NO: 6233 - DNA, 20 bp, Artificial
  Synthetically generated peptide
ggggcggccacaagatcgcg

SEQ ID NO: 6234 - DNA, 20 bp, Artificial
  Synthetically generated peptide
aggggcggccacaagatcgc

SEQ ID NO: 6235 - DNA, 26 bp, Artificial
  Synthetically generated peptide
ccgacgcgaggcggtgccgggaccgg

SEQ ID NO: 6236 - DNA, 20 bp, Artificial
  Synthetically generated peptide
cgacgcgaggcggtgccggg

SEQ ID NO: 6237 - DNA, 20 bp, Artificial
  Synthetically generated peptide
accgacgcgaggcggtgccg

SEQ ID NO: 6238 - DNA, 20 bp, Artificial
  Synthetically generated peptide
gaccgacgcgaggcggtgcc

SEQ ID NO: 6239 - DNA, 20 bp, Artificial
  Synthetically generated peptide
agaccgacgcgaggcggtgc

SEQ ID NO: 6240 - DNA, 22 bp, Artificial
  Synthetically generated peptide
cacggcgcgtgtgcccaagcgc

SEQ ID NO: 6241 - DNA, 20 bp, Artificial
  Synthetically generated peptide
acggcgcgtgtgcccaagcg

SEQ ID NO: 6242 - DNA, 20 bp, Artificial
  Synthetically generated peptide
cggcgcgtgtgcccaagcgc

SEQ ID NO: 6243 - DNA, 20 bp, Artificial
  Synthetically generated peptide
ggcgcgtgtgcccaagcgct

SEQ ID NO: 6244 - DNA, 20 bp, Artificial
  Synthetically generated peptide
gcgcgtgtgcccaagcgctt

SEQ ID NO: 6245 - DNA, 20 bp, Artificial
  Synthetically generated peptide
cgcgtgtgcccaagcgcttg

SEQ ID NO: 6246 - DNA, 20 bp, Artificial
  Synthetically generated peptide
gcgtgtgcccaagcgcttgg

SEQ ID NO: 6247 - DNA, 20 bp, Artificial
  Synthetically generated peptide
cgtgtgcccaagcgcttggg

SEQ ID NO: 6248 - DNA, 20 bp, Artificial
  Synthetically generated peptide
gtgtgcccaagcgcttgggg

SEQ ID NO: 6249 - DNA, 20 bp, Artificial
  Synthetically generated peptide
tgtgcccaagcgcttggggc

SEQ ID NO: 6250 - DNA, 20 bp, Artificial
  Synthetically generated peptide
gtgcccaagcgcttggggca

SEQ ID NO: 6251 - DNA, 20 bp, Artificial
  Synthetically generated peptide
tgcccaagcgcttggggcat

SEQ ID NO: 6252 - DNA, 20 bp, Artificial
  Synthetically generated peptide
gcccaagcgcttggggcatg

SEQ ID NO: 6253 - DNA, 20 bp, Artificial
  Synthetically generated peptide
cccaagcgcttggggcatga

SEQ ID NO: 6254 - DNA, 20 bp, Artificial
  Synthetically generated peptide
ccaagcgcttggggcatgag

SEQ ID NO: 6255 - DNA, 20 bp, Artificial
  Synthetically generated peptide
caagcgcttggggcatgagg

SEQ ID NO: 6256 - DNA, 20 bp, Artificial
  Synthetically generated peptide
aagcgcttggggcatgaggc

SEQ ID NO: 6257 - DNA, 20 bp, Artificial
  Synthetically generated peptide
agcgcttggggcatgaggcg

SEQ ID NO: 6258 - DNA, 20 bp, Artificial
  Synthetically generated peptide
gcgcttggggcatgaggcgc

SEQ ID NO: 6259 - DNA, 20 bp, Artificial
  Synthetically generated peptide
cgcttggggcatgaggcgcg

SEQ ID NO: 6260 - DNA, 20 bp, Artificial
  Synthetically generated peptide
gcttggggcatgaggcgcgg

SEQ ID NO: 6261 - DNA, 20 bp, Artificial
  Synthetically generated peptide
cttggggcatgaggcgcggg

SEQ ID NO: 6262 - DNA, 20 bp, Artificial
  Synthetically generated peptide
ccacggcgcgtgtgcccaag

SEQ ID NO: 6263 - DNA, 20 bp, Artificial
  Synthetically generated peptide
accacggcgcgtgtgcccaa

SEQ ID NO: 6264 - DNA, 20 bp, Artificial
  Synthetically generated peptide
taccacggcgcgtgtgccca

SEQ ID NO: 6265 - DNA, 20 bp, Artificial
  Synthetically generated peptide
ttaccacggcgcgtgtgccc

SEQ ID NO: 6266 - DNA, 20 bp, Artificial
  Synthetically generated peptide
cttaccacggcgcgtgtgcc

SEQ ID NO: 6267 - DNA, 20 bp, Artificial
  Synthetically generated peptide
ccttaccacggcgcgtgtgc

SEQ ID NO: 6268 - DNA, 20 bp, Artificial
  Synthetically generated peptide
gccttaccacggcgcgtgtg

SEQ ID NO: 6269 - DNA, 20 bp, Artificial
  Synthetically generated peptide
tgccttaccacggcgcgtgt

SEQ ID NO: 6270 - DNA, 20 bp, Artificial
  Synthetically generated peptide
ttgccttaccacggcgcgtg

SEQ ID NO: 6271 - DNA, 20 bp, Artificial
  Synthetically generated peptide
cttgccttaccacggcgcgt

SEQ ID NO: 6272 - DNA, 20 bp, Artificial
  Synthetically generated peptide
gcttgccttaccacggcgcg

SEQ ID NO: 6273 - DNA, 20 bp, Artificial
  Synthetically generated peptide
cgcttgccttaccacggcgc

SEQ ID NO: 6274 - DNA, 20 bp, Artificial
  Synthetically generated peptide
tcgcttgccttaccacggcg

SEQ ID NO: 6275 - DNA, 20 bp, Artificial
  Synthetically generated peptide
ctcgcttgccttaccacggc

SEQ ID NO: 6276 - DNA, 20 bp, Artificial
  Synthetically generated peptide
cctcgcttgccttaccacgg

SEQ ID NO: 6277 - DNA, 20 bp, Artificial
  Synthetically generated peptide
ccctcgcttgccttaccacg

SEQ ID NO: 6278 - DNA, 20 bp, Artificial
  Synthetically generated peptide
gccctcgcttgccttaccac

SEQ ID NO: 6279 - DNA, 20 bp, Artificial
  Synthetically generated peptide
cgccctcgcttgccttacca

SEQ ID NO: 6280 - DNA, 20 bp, Artificial
  Synthetically generated peptide
gcgccctcgcttgccttacc

SEQ ID NO: 6281 - DNA, 20 bp, Artificial
  Synthetically generated peptide
ggcgccctcgcttgccttac

SEQ ID NO: 6282 - DNA, 20 bp, Artificial
  Synthetically generated peptide
gggcgccctcgcttgcctta

SEQ ID NO: 6283 - DNA, 20 bp, Artificial
  Synthetically generated peptide
cgggcgccctcgcttgcctt

SEQ ID NO: 6284 - DNA, 20 bp, Artificial
  Synthetically generated peptide
ccgggcgccctcgcttgcct

SEQ ID NO: 6285 - DNA, 20 bp, Artificial
  Synthetically generated peptide
accgggcgccctcgcttgcc

SEQ ID NO: 6286 - DNA, 20 bp, Artificial
  Synthetically generated peptide
gaccgggcgccctcgcttgc

SEQ ID NO: 6287 - DNA, 20 bp, Artificial
  Synthetically generated peptide
ggaccgggcgccctcgcttg

SEQ ID NO: 6288 - DNA, 20 bp, Artificial
  Synthetically generated peptide
gggaccgggcgccctcgctt

SEQ ID NO: 6289 - DNA, 20 bp, Artificial
  Synthetically generated peptide
cgggaccgggcgccctcgct

SEQ ID NO: 6290 - DNA, 20 bp, Artificial
  Synthetically generated peptide
ccgggaccgggcgccctcgc

SEQ ID NO: 6291 - DNA, 20 bp, Artificial
  Synthetically generated peptide
gccgggaccgggcgccctcg

SEQ ID NO: 6292 - DNA, 20 bp, Artificial
  Synthetically generated peptide
tgccgggaccgggcgccctc

SEQ ID NO: 6293 - DNA, 20 bp, Artificial
  Synthetically generated peptide
gtgccgggaccgggcgccct

SEQ ID NO: 6294 - DNA, 20 bp, Artificial
  Synthetically generated peptide
ggtgccgggaccgggcgccc

SEQ ID NO: 6295 - DNA, 20 bp, Artificial
  Synthetically generated peptide
cggtgccgggaccgggcgcc

SEQ ID NO: 6296 - DNA, 20 bp, Artificial
  Synthetically generated peptide
gcggtgccgggaccgggcgc

SEQ ID NO: 6297 - DNA, 20 bp, Artificial
  Synthetically generated peptide
ggcggtgccgggaccgggcg

SEQ ID NO: 6298 - DNA, 20 bp, Artificial
  Synthetically generated peptide
aggcggtgccgggaccgggc

SEQ ID NO: 6299 - DNA, 22 bp, Artificial
  Synthetically generated peptide
cgtggacacacgcccctagccc

SEQ ID NO: 6300 - DNA, 20 bp, Artificial
  Synthetically generated peptide
gtggacacacgcccctagcc

SEQ ID NO: 6301 - DNA, 20 bp, Artificial
  Synthetically generated peptide
tggacacacgcccctagccc

SEQ ID NO: 6302 - DNA, 20 bp, Artificial
  Synthetically generated peptide
ggacacacgcccctagcccc

SEQ ID NO: 6303 - DNA, 20 bp, Artificial
  Synthetically generated peptide
gacacacgcccctagccccc

SEQ ID NO: 6304 - DNA, 20 bp, Artificial
  Synthetically generated peptide
acacacgcccctagccccca

SEQ ID NO: 6305 - DNA, 20 bp, Artificial
  Synthetically generated peptide
cacacgcccctagcccccac

SEQ ID NO: 6306 - DNA, 20 bp, Artificial
  Synthetically generated peptide
acacgcccctagcccccacc

SEQ ID NO: 6307 - DNA, 20 bp, Artificial
  Synthetically generated peptide
cacgcccctagcccccaccg

SEQ ID NO: 6308 - DNA, 20 bp, Artificial
  Synthetically generated peptide
acgcccctagcccccaccgc

SEQ ID NO: 6309 - DNA, 20 bp, Artificial
  Synthetically generated peptide
cgcccctagcccccaccgcc

SEQ ID NO: 6310 - DNA, 20 bp, Artificial
  Synthetically generated peptide
gcccctagcccccaccgcct

SEQ ID NO: 6311 - DNA, 20 bp, Artificial
  Synthetically generated peptide
cccctagcccccaccgcctt

SEQ ID NO: 6312 - DNA, 20 bp, Artificial
  Synthetically generated peptide
ccctagcccccaccgcctta

SEQ ID NO: 6313 - DNA, 20 bp, Artificial
  Synthetically generated peptide
cctagcccccaccgccttag

SEQ ID NO: 6314 - DNA, 20 bp, Artificial
  Synthetically generated peptide
ctagcccccaccgccttaga

SEQ ID NO: 6315 - DNA, 20 bp, Artificial
  Synthetically generated peptide
tagcccccaccgccttagag

SEQ ID NO: 6316 - DNA, 20 bp, Artificial
  Synthetically generated peptide
agcccccaccgccttagagt

SEQ ID NO: 6317 - DNA, 20 bp, Artificial
  Synthetically generated peptide
gcccccaccgccttagagtg

SEQ ID NO: 6318 - DNA, 20 bp, Artificial
  Synthetically generated peptide
cccccaccgccttagagtgt

SEQ ID NO: 6319 - DNA, 20 bp, Artificial
  Synthetically generated peptide
ccccaccgccttagagtgtc

SEQ ID NO: 6320 - DNA, 20 bp, Artificial
  Synthetically generated peptide
cccaccgccttagagtgtca

SEQ ID NO: 6321 - DNA, 20 bp, Artificial
  Synthetically generated peptide
ccaccgccttagagtgtcag

SEQ ID NO: 6322 - DNA, 20 bp, Artificial
  Synthetically generated peptide
caccgccttagagtgtcagt

SEQ ID NO: 6323 - DNA, 20 bp, Artificial
  Synthetically generated peptide
accgccttagagtgtcagtt

SEQ ID NO: 6324 - DNA, 20 bp, Artificial
  Synthetically generated peptide
ccgccttagagtgtcagtta

SEQ ID NO: 6325 - DNA, 20 bp, Artificial
  Synthetically generated peptide
cgccttagagtgtcagttac

SEQ ID NO: 6326 - DNA, 20 bp, Artificial
  Synthetically generated peptide
gcgtggacacacgcccctag

SEQ ID NO: 6327 - DNA, 20 bp, Artificial
  Synthetically generated peptide
agcgtggacacacgccccta

SEQ ID NO: 6328 - DNA, 20 bp, Artificial
  Synthetically generated peptide
aagcgtggacacacgcccct

SEQ ID NO: 6329 - DNA, 20 bp, Artificial
  Synthetically generated peptide
caagcgtggacacacgcccc

SEQ ID NO: 6330 - DNA, 20 bp, Artificial
  Synthetically generated peptide
gcaagcgtggacacacgccc

SEQ ID NO: 6331 - DNA, 20 bp, Artificial
  Synthetically generated peptide
ggcaagcgtggacacacgcc

SEQ ID NO: 6332 - DNA, 20 bp, Artificial
  Synthetically generated peptide
tggcaagcgtggacacacgc

SEQ ID NO: 6333 - DNA, 20 bp, Artificial
  Synthetically generated peptide
ttggcaagcgtggacacacg

SEQ ID NO: 6334 - DNA, 20 bp, Artificial
  Synthetically generated peptide
tttggcaagcgtggacacac

SEQ ID NO: 6335 - DNA, 20 bp, Artificial
  Synthetically generated peptide
ttttggcaagcgtggacaca

SEQ ID NO: 6336 - DNA, 20 bp, Artificial
  Synthetically generated peptide
tttttggcaagcgtggacac

SEQ ID NO: 6337 - DNA, 20 bp, Artificial
  Synthetically generated peptide
ctttttggcaagcgtggaca

SEQ ID NO: 6338 - DNA, 20 bp, Artificial
  Synthetically generated peptide
tctttttggcaagcgtggac

SEQ ID NO: 6339 - DNA, 20 bp, Artificial
  Synthetically generated peptide
atctttttggcaagcgtgga

SEQ ID NO: 6340 - DNA, 20 bp, Artificial
  Synthetically generated peptide
aatctttttggcaagcgtgg

SEQ ID NO: 6341 - DNA, 25 bp, Artificial
  Synthetically generated peptide
tagacacttcggtgaatcgtgccgc

SEQ ID NO: 6342 - DNA, 20 bp, Artificial
  Synthetically generated peptide
agacacttcggtgaatcgtg

SEQ ID NO: 6343 - DNA, 20 bp, Artificial
  Synthetically generated peptide
gacacttcggtgaatcgtgc

SEQ ID NO: 6344 - DNA, 20 bp, Artificial
  Synthetically generated peptide
acacttcggtgaatcgtgcc

SEQ ID NO: 6345 - DNA, 20 bp, Artificial
  Synthetically generated peptide
cacttcggtgaatcgtgccg

SEQ ID NO: 6346 - DNA, 20 bp, Artificial
  Synthetically generated peptide
acttcggtgaatcgtgccgc

SEQ ID NO: 6347 - DNA, 20 bp, Artificial
  Synthetically generated peptide
cttcggtgaatcgtgccgct

SEQ ID NO: 6348 - DNA, 20 bp, Artificial
  Synthetically generated peptide
ttcggtgaatcgtgccgcta

SEQ ID NO: 6349 - DNA, 20 bp, Artificial
  Synthetically generated peptide
tcggtgaatcgtgccgctat

SEQ ID NO: 6350 - DNA, 20 bp, Artificial
  Synthetically generated peptide
cggtgaatcgtgccgctatg

SEQ ID NO: 6351 - DNA, 20 bp, Artificial
  Synthetically generated peptide
ggtgaatcgtgccgctatga

SEQ ID NO: 6352 - DNA, 20 bp, Artificial
  Synthetically generated peptide
gtgaatcgtgccgctatgaa

SEQ ID NO: 6353 - DNA, 20 bp, Artificial
  Synthetically generated peptide
tgaatcgtgccgctatgaac

SEQ ID NO: 6354 - DNA, 20 bp, Artificial
  Synthetically generated peptide
gaatcgtgccgctatgaaca

SEQ ID NO: 6355 - DNA, 20 bp, Artificial
  Synthetically generated peptide
aatcgtgccgctatgaacac

SEQ ID NO: 6356 - DNA, 20 bp, Artificial
  Synthetically generated peptide
atcgtgccgctatgaacaca

SEQ ID NO: 6357 - DNA, 20 bp, Artificial
  Synthetically generated peptide
tcgtgccgctatgaacacag

SEQ ID NO: 6358 - DNA, 20 bp, Artificial
  Synthetically generated peptide
cgtgccgctatgaacacaga

SEQ ID NO: 6359 - DNA, 20 bp, Artificial
  Synthetically generated peptide
gtgccgctatgaacacagat

SEQ ID NO: 6360 - DNA, 20 bp, Artificial
  Synthetically generated peptide
tgccgctatgaacacagatg

SEQ ID NO: 6361 - DNA, 20 bp, Artificial
  Synthetically generated peptide
gccgctatgaacacagatgt

SEQ ID NO: 6362 - DNA, 20 bp, Artificial
  Synthetically generated peptide
ccgctatgaacacagatgta

SEQ ID NO: 6363 - DNA, 20 bp, Artificial
  Synthetically generated peptide
cgctatgaacacagatgtac

SEQ ID NO: 6364 - DNA, 20 bp, Artificial
  Synthetically generated peptide
ctagacacttcggtgaatcg

SEQ ID NO: 6365 - DNA, 20 bp, Artificial
  Synthetically generated peptide
actagacacttcggtgaatc

SEQ ID NO: 6366 - DNA, 20 bp, Artificial
  Synthetically generated peptide
cactagacacttcggtgaat

SEQ ID NO: 6367 - DNA, 20 bp, Artificial
  Synthetically generated peptide
ccactagacacttcggtgaa

SEQ ID NO: 6368 - DNA, 20 bp, Artificial
  Synthetically generated peptide
gccactagacacttcggtga

SEQ ID NO: 6369 - DNA, 20 bp, Artificial
  Synthetically generated peptide
tgccactagacacttcggtg

SEQ ID NO: 6370 - DNA, 20 bp, Artificial
  Synthetically generated peptide
ctgccactagacacttcggt

SEQ ID NO: 6371 - DNA, 20 bp, Artificial
  Synthetically generated peptide
tctgccactagacacttcgg

SEQ ID NO: 6372 - DNA, 20 bp, Artificial
  Synthetically generated peptide
atctgccactagacacttcg

SEQ ID NO: 6373 - DNA, 31 bp, Artificial
  Synthetically generated peptide
gagccactgcgcccggcctcattaagggcat

SEQ ID NO: 6374 - DNA, 20 bp, Artificial
  Synthetically generated peptide
agccactgcgcccggcctca

SEQ ID NO: 6375 - DNA, 20 bp, Artificial
  Synthetically generated peptide
gccactgcgcccggcctcat

SEQ ID NO: 6376 - DNA, 20 bp, Artificial
  Synthetically generated peptide
ccactgcgcccggcctcatt

SEQ ID NO: 6377 - DNA, 20 bp, Artificial
  Synthetically generated peptide
cactgcgcccggcctcatta

SEQ ID NO: 6378 - DNA, 20 bp, Artificial
  Synthetically generated peptide
actgcgcccggcctcattaa

SEQ ID NO: 6379 - DNA, 20 bp, Artificial
  Synthetically generated peptide
ctgcgcccggcctcattaag

SEQ ID NO: 6380 - DNA, 20 bp, Artificial
  Synthetically generated peptide
tgcgcccggcctcattaagg

SEQ ID NO: 6381 - DNA, 20 bp, Artificial
  Synthetically generated peptide
gcgcccggcctcattaaggg

SEQ ID NO: 6382 - DNA, 20 bp, Artificial
  Synthetically generated peptide
cgcccggcctcattaagggc

SEQ ID NO: 6383 - DNA, 20 bp, Artificial
  Synthetically generated peptide
gcccggcctcattaagggca

SEQ ID NO: 6384 - DNA, 20 bp, Artificial
  Synthetically generated peptide
cccggcctcattaagggcat

SEQ ID NO: 6385 - DNA, 20 bp, Artificial
  Synthetically generated peptide
ccggcctcattaagggcatt

SEQ ID NO: 6386 - DNA, 20 bp, Artificial
  Synthetically generated peptide
cggcctcattaagggcattc

SEQ ID NO: 6387 - DNA, 20 bp, Artificial
  Synthetically generated peptide
cgagccactgcgcccggcct

SEQ ID NO: 6388 - DNA, 20 bp, Artificial
  Synthetically generated peptide
acgagccactgcgcccggcc

SEQ ID NO: 6389 - DNA, 20 bp, Artificial
  Synthetically generated peptide
cacgagccactgcgcccggc

SEQ ID NO: 6390 - DNA, 20 bp, Artificial
  Synthetically generated peptide
gcacgagccactgcgcccgg

SEQ ID NO: 6391 - DNA, 20 bp, Artificial
  Synthetically generated peptide
ggcacgagccactgcgcccg

SEQ ID NO: 6392 - DNA, 20 bp, Artificial
  Synthetically generated peptide
aggcacgagccactgcgccc

SEQ ID NO: 6393 - DNA, 20 bp, Artificial
  Synthetically generated peptide
caggcacgagccactgcgcc

SEQ ID NO: 6394 - DNA, 20 bp, Artificial
  Synthetically generated peptide
acaggcacgagccactgcgc

SEQ ID NO: 6395 - DNA, 20 bp, Artificial
  Synthetically generated peptide
tacaggcacgagccactgcg

SEQ ID NO: 6396 - DNA, 20 bp, Artificial
  Synthetically generated peptide
ttacaggcacgagccactgc

SEQ ID NO: 6397 - DNA, 20 bp, Artificial
  Synthetically generated peptide
attacaggcacgagccactg

SEQ ID NO: 6398 - DNA, 20 bp, Artificial
  Synthetically generated peptide
gattacaggcacgagccact

SEQ ID NO: 6399 - DNA, 20 bp, Artificial
  Synthetically generated peptide
ggattacaggcacgagccac

SEQ ID NO: 6400 - DNA, 20 bp, Artificial
  Synthetically generated peptide
gggattacaggcacgagcca

SEQ ID NO: 6401 - DNA, 20 bp, Artificial
  Synthetically generated peptide
tgggattacaggcacgagcc

SEQ ID NO: 6402 - DNA, 20 bp, Artificial
  Synthetically generated peptide
ctgggattacaggcacgagc

SEQ ID NO: 6403 - DNA, 20 bp, Artificial
  Synthetically generated peptide
gctgggattacaggcacgag

SEQ ID NO: 6404 - DNA, 20 bp, Artificial
  Synthetically generated peptide
tgctgggattacaggcacga

SEQ ID NO: 6405 - DNA, 20 bp, Artificial
  Synthetically generated peptide
gtgctgggattacaggcacg

SEQ ID NO: 6406 - DNA, 30 bp, Artificial
  Synthetically generated peptide
cgaacaacttcattacaattcgacaagcgc

SEQ ID NO: 6407 - DNA, 28 bp, Artificial
  Synthetically generated peptide
cgtagttaagcgtgtaccagcccaaggc

SEQ ID NO: 6408 - DNA, 20 bp, Artificial
  Synthetically generated peptide
gtagttaagcgtgtaccagc

SEQ ID NO: 6409 - DNA, 20 bp, Artificial
  Synthetically generated peptide
tagttaagcgtgtaccagcc

SEQ ID NO: 6410 - DNA, 20 bp, Artificial
  Synthetically generated peptide
agttaagcgtgtaccagccc

SEQ ID NO: 6411 - DNA, 20 bp, Artificial
  Synthetically generated peptide
gttaagcgtgtaccagccca

SEQ ID NO: 6412 - DNA, 20 bp, Artificial
  Synthetically generated peptide
ttaagcgtgtaccagcccaa

SEQ ID NO: 6413 - DNA, 20 bp, Artificial
  Synthetically generated peptide
taagcgtgtaccagcccaag

SEQ ID NO: 6414 - DNA, 20 bp, Artificial
  Synthetically generated peptide
aagcgtgtaccagcccaagg

SEQ ID NO: 6415 - DNA, 20 bp, Artificial
  Synthetically generated peptide
agcgtgtaccagcccaaggc

SEQ ID NO: 6416 - DNA, 20 bp, Artificial
  Synthetically generated peptide
gcgtgtaccagcccaaggca

SEQ ID NO: 6417 - DNA, 20 bp, Artificial
  Synthetically generated peptide
cgtgtaccagcccaaggcac

SEQ ID NO: 6418 - DNA, 20 bp, Artificial
  Synthetically generated peptide
acgtagttaagcgtgtacca

SEQ ID NO: 6419 - DNA, 20 bp, Artificial
  Synthetically generated peptide
tacgtagttaagcgtgtacc

SEQ ID NO: 6420 - DNA, 20 bp, Artificial
  Synthetically generated peptide
gtacgtagttaagcgtgtac

SEQ ID NO: 6421 - DNA, 24 bp, Artificial
  Synthetically generated peptide
gagcggtgaccgtgtctgtcttag

SEQ ID NO: 6422 - DNA, 20 bp, Artificial
  Synthetically generated peptide
agcggtgaccgtgtctgtct

SEQ ID NO: 6423 - DNA, 20 bp, Artificial
  Synthetically generated peptide
gcggtgaccgtgtctgtctt

SEQ ID NO: 6424 - DNA, 20 bp, Artificial
  Synthetically generated peptide
cggtgaccgtgtctgtctta

SEQ ID NO: 6425 - DNA, 20 bp, Artificial
  Synthetically generated peptide
ggtgaccgtgtctgtcttag

SEQ ID NO: 6426 - DNA, 20 bp, Artificial
  Synthetically generated peptide
gtgaccgtgtctgtcttagt

SEQ ID NO: 6427 - DNA, 20 bp, Artificial
  Synthetically generated peptide
tgaccgtgtctgtcttagtt

SEQ ID NO: 6428 - DNA, 20 bp, Artificial
  Synthetically generated peptide
gaccgtgtctgtcttagtta

SEQ ID NO: 6429 - DNA, 20 bp, Artificial
  Synthetically generated peptide
accgtgtctgtcttagttag

SEQ ID NO: 6430 - DNA, 20 bp, Artificial
  Synthetically generated peptide
ccgtgtctgtcttagttagc

SEQ ID NO: 6431 - DNA, 20 bp, Artificial
  Synthetically generated peptide
cgtgtctgtcttagttagca

SEQ ID NO: 6432 - DNA, 20 bp, Artificial
  Synthetically generated peptide
agagcggtgaccgtgtctgt

SEQ ID NO: 6433 - DNA, 20 bp, Artificial
  Synthetically generated peptide
cagagcggtgaccgtgtctg

SEQ ID NO: 6434 - DNA, 20 bp, Artificial
  Synthetically generated peptide
ccagagcggtgaccgtgtct

SEQ ID NO: 6435 - DNA, 20 bp, Artificial
  Synthetically generated peptide
gccagagcggtgaccgtgtc

SEQ ID NO: 6436 - DNA, 20 bp, Artificial
  Synthetically generated peptide
ggccagagcggtgaccgtgt

SEQ ID NO: 6437 - DNA, 20 bp, Artificial
  Synthetically generated peptide
aggccagagcggtgaccgtg

SEQ ID NO: 6438 - DNA, 20 bp, Artificial
  Synthetically generated peptide
caggccagagcggtgaccgt

SEQ ID NO: 6439 - DNA, 20 bp, Artificial
  Synthetically generated peptide
acaggccagagcggtgaccg

SEQ ID NO: 6440 - DNA, 20 bp, Artificial
  Synthetically generated peptide
cacaggccagagcggtgacc

SEQ ID NO: 6441 - DNA, 20 bp, Artificial
  Synthetically generated peptide
tcacaggccagagcggtgac

SEQ ID NO: 6442 - DNA, 20 bp, Artificial
  Synthetically generated peptide
ctcacaggccagagcggtga

SEQ ID NO: 6443 - DNA, 20 bp, Artificial
  Synthetically generated peptide
gctcacaggccagagcggtg

SEQ ID NO: 6444 - DNA, 20 bp, Artificial
  Synthetically generated peptide
agctcacaggccagagcggt

SEQ ID NO: 6445 - DNA, 20 bp, Artificial
  Synthetically generated peptide
tagctcacaggccagagcgg

SEQ ID NO: 6446 - DNA, 20 bp, Artificial
  Synthetically generated peptide
ctagctcacaggccagagcg

SEQ ID NO: 6447 - DNA, 29 bp, Artificial
  Synthetically generated peptide
cggtttgcagattccagacccgatggacg

SEQ ID NO: 6448 - DNA, 20 bp, Artificial
  Synthetically generated peptide
ccggtttgcagattccagac

SEQ ID NO: 6449 - DNA, 20 bp, Artificial
  Synthetically generated peptide
accggtttgcagattccaga

SEQ ID NO: 6450 - DNA, 20 bp, Artificial
  Synthetically generated peptide
caccggtttgcagattccag

SEQ ID NO: 6451 - DNA, 20 bp, Artificial
  Synthetically generated peptide
ccaccggtttgcagattcca

SEQ ID NO: 6452 - DNA, 20 bp, Artificial
  Synthetically generated peptide
cccaccggtttgcagattcc

SEQ ID NO: 6453 - DNA, 20 bp, Artificial
  Synthetically generated peptide
gcccaccggtttgcagattc

SEQ ID NO: 6454 - DNA, 20 bp, Artificial
  Synthetically generated peptide
ggcccaccggtttgcagatt

SEQ ID NO: 6455 - DNA, 20 bp, Artificial
  Synthetically generated peptide
gggcccaccggtttgcagat

SEQ ID NO: 6456 - DNA, 20 bp, Artificial
  Synthetically generated peptide
tgggcccaccggtttgcaga

SEQ ID NO: 6457 - DNA, 20 bp, Artificial
  Synthetically generated peptide
ttgggcccaccggtttgcag

SEQ ID NO: 6458 - DNA, 20 bp, Artificial
  Synthetically generated peptide
tttgggcccaccggtttgca

SEQ ID NO: 6459 - DNA, 20 bp, Artificial
  Synthetically generated peptide
ctttgggcccaccggtttgc

SEQ ID NO: 6460 - DNA, 20 bp, Artificial
  Synthetically generated peptide
gctttgggcccaccggtttg

SEQ ID NO: 6461 - DNA, 20 bp, Artificial
  Synthetically generated peptide
agctttgggcccaccggttt

SEQ ID NO: 6462 - DNA, 20 bp, Artificial
  Synthetically generated peptide
tagctttgggcccaccggtt

SEQ ID NO: 6463 - DNA, 20 bp, Artificial
  Synthetically generated peptide
ctagctttgggcccaccggt

SEQ ID NO: 6464 - DNA, 20 bp, Artificial
  Synthetically generated peptide
tctagctttgggcccaccgg

SEQ ID NO: 6465 - DNA, 20 bp, Artificial
  Synthetically generated peptide
ctctagctttgggcccaccg

SEQ ID NO: 6466 - DNA, 27 bp, Artificial
  Synthetically generated peptide
cgcgcgcccgcctcactcagctgagcg

SEQ ID NO: 6467 - DNA, 20 bp, Artificial
  Synthetically generated peptide
gcgcgcccgcctcactcagc

SEQ ID NO: 6468 - DNA, 20 bp, Artificial
  Synthetically generated peptide
cgcgcccgcctcactcagct

SEQ ID NO: 6469 - DNA, 20 bp, Artificial
  Synthetically generated peptide
gcgcccgcctcactcagctg

SEQ ID NO: 6470 - DNA, 20 bp, Artificial
  Synthetically generated peptide
cgcccgcctcactcagctga

SEQ ID NO: 6471 - DNA, 20 bp, Artificial
  Synthetically generated peptide
gcccgcctcactcagctgag

SEQ ID NO: 6472 - DNA, 20 bp, Artificial
  Synthetically generated peptide
cccgcctcactcagctgagc

SEQ ID NO: 6473 - DNA, 20 bp, Artificial
  Synthetically generated peptide
ccgcctcactcagctgagcg

SEQ ID NO: 6474 - DNA, 20 bp, Artificial
  Synthetically generated peptide
cgcctcactcagctgagcgt

SEQ ID NO: 6475 - DNA, 20 bp, Artificial
  Synthetically generated peptide
gcctcactcagctgagcgtc

SEQ ID NO: 6476 - DNA, 20 bp, Artificial
  Synthetically generated peptide
cctcactcagctgagcgtcc

SEQ ID NO: 6477 - DNA, 20 bp, Artificial
  Synthetically generated peptide
ctcactcagctgagcgtccg

SEQ ID NO: 6478 - DNA, 20 bp, Artificial
  Synthetically generated peptide
tcactcagctgagcgtccgg

SEQ ID NO: 6479 - DNA, 20 bp, Artificial
  Synthetically generated peptide
cactcagctgagcgtccgga

SEQ ID NO: 6480 - DNA, 20 bp, Artificial
  Synthetically generated peptide
actcagctgagcgtccggag

SEQ ID NO: 6481 - DNA, 20 bp, Artificial
  Synthetically generated peptide
ctcagctgagcgtccggagc

SEQ ID NO: 6482 - DNA, 20 bp, Artificial
  Synthetically generated peptide
tcagctgagcgtccggagcc

SEQ ID NO: 6483 - DNA, 20 bp, Artificial
  Synthetically generated peptide
cagctgagcgtccggagccc

SEQ ID NO: 6484 - DNA, 20 bp, Artificial
  Synthetically generated peptide
agctgagcgtccggagcccg

SEQ ID NO: 6485 - DNA, 20 bp, Artificial
  Synthetically generated peptide
gctgagcgtccggagcccgt

SEQ ID NO: 6486 - DNA, 20 bp, Artificial
  Synthetically generated peptide
ctgagcgtccggagcccgtc

SEQ ID NO: 6487 - DNA, 20 bp, Artificial
  Synthetically generated peptide
tgagcgtccggagcccgtcg

SEQ ID NO: 6488 - DNA, 20 bp, Artificial
  Synthetically generated peptide
gagcgtccggagcccgtcga

SEQ ID NO: 6489 - DNA, 20 bp, Artificial
  Synthetically generated peptide
agcgtccggagcccgtcgag

SEQ ID NO: 6490 - DNA, 20 bp, Artificial
  Synthetically generated peptide
gcgtccggagcccgtcgagg

SEQ ID NO: 6491 - DNA, 20 bp, Artificial
  Synthetically generated peptide
cgtccggagcccgtcgagga

SEQ ID NO: 6492 - DNA, 20 bp, Artificial
  Synthetically generated peptide
gtccggagcccgtcgaggac

SEQ ID NO: 6493 - DNA, 20 bp, Artificial
  Synthetically generated peptide
tccggagcccgtcgaggact

SEQ ID NO: 6494 - DNA, 20 bp, Artificial
  Synthetically generated peptide
ccggagcccgtcgaggacta

SEQ ID NO: 6495 - DNA, 20 bp, Artificial
  Synthetically generated peptide
cggagcccgtcgaggactag

SEQ ID NO: 6496 - DNA, 20 bp, Artificial
  Synthetically generated peptide
ggagcccgtcgaggactagc

SEQ ID NO: 6497 - DNA, 20 bp, Artificial
  Synthetically generated peptide
gagcccgtcgaggactagca

SEQ ID NO: 6498 - DNA, 20 bp, Artificial
  Synthetically generated peptide
agcccgtcgaggactagcat

SEQ ID NO: 6499 - DNA, 20 bp, Artificial
  Synthetically generated peptide
gcccgtcgaggactagcatc

SEQ ID NO: 6500 - DNA, 20 bp, Artificial
  Synthetically generated peptide
cccgtcgaggactagcatcc

SEQ ID NO: 6501 - DNA, 20 bp, Artificial
  Synthetically generated peptide
ccgtcgaggactagcatccg

SEQ ID NO: 6502 - DNA, 20 bp, Artificial
  Synthetically generated peptide
cgtcgaggactagcatccgc

SEQ ID NO: 6503 - DNA, 20 bp, Artificial
  Synthetically generated peptide
gtcgaggactagcatccgcc

SEQ ID NO: 6504 - DNA, 20 bp, Artificial
  Synthetically generated peptide
tcgaggactagcatccgcca

SEQ ID NO: 6505 - DNA, 20 bp, Artificial
  Synthetically generated peptide
cgaggactagcatccgccag

SEQ ID NO: 6506 - DNA, 20 bp, Artificial
  Synthetically generated peptide
gaggactagcatccgccagg

SEQ ID NO: 6507 - DNA, 20 bp, Artificial
  Synthetically generated peptide
aggactagcatccgccaggg

SEQ ID NO: 6508 - DNA, 20 bp, Artificial
  Synthetically generated peptide
ggactagcatccgccagggg

SEQ ID NO: 6509 - DNA, 20 bp, Artificial
  Synthetically generated peptide
gactagcatccgccaggggg

SEQ ID NO: 6510 - DNA, 20 bp, Artificial
  Synthetically generated peptide
actagcatccgccagggggc

SEQ ID NO: 6511 - DNA, 20 bp, Artificial
  Synthetically generated peptide
ctagcatccgccagggggcg

SEQ ID NO: 6512 - DNA, 20 bp, Artificial
  Synthetically generated peptide
tagcatccgccagggggcgc

SEQ ID NO: 6513 - DNA, 20 bp, Artificial
  Synthetically generated peptide
agcatccgccagggggcgcg

SEQ ID NO: 6514 - DNA, 20 bp, Artificial
  Synthetically generated peptide
gcatccgccagggggcgcgg

SEQ ID NO: 6515 - DNA, 20 bp, Artificial
  Synthetically generated peptide
catccgccagggggcgcggc

SEQ ID NO: 6516 - DNA, 20 bp, Artificial
  Synthetically generated peptide
atccgccagggggcgcggcg

SEQ ID NO: 6517 - DNA, 20 bp, Artificial
  Synthetically generated peptide
tccgccagggggcgcggcga

SEQ ID NO: 6518 - DNA, 20 bp, Artificial
  Synthetically generated peptide
ccgccagggggcgcggcgag

SEQ ID NO: 6519 - DNA, 20 bp, Artificial
  Synthetically generated peptide
acgcgcgcccgcctcactca

SEQ ID NO: 6520 - DNA, 20 bp, Artificial
  Synthetically generated peptide
cacgcgcgcccgcctcactc

SEQ ID NO: 6521 - DNA, 20 bp, Artificial
  Synthetically generated peptide
ccacgcgcgcccgcctcact

SEQ ID NO: 6522 - DNA, 20 bp, Artificial
  Synthetically generated peptide
cccacgcgcgcccgcctcac

SEQ ID NO: 6523 - DNA, 20 bp, Artificial
  Synthetically generated peptide
tcccacgcgcgcccgcctca

SEQ ID NO: 6524 - DNA, 20 bp, Artificial
  Synthetically generated peptide
ctcccacgcgcgcccgcctc

SEQ ID NO: 6525 - DNA, 20 bp, Artificial
  Synthetically generated peptide
cctcccacgcgcgcccgcct

SEQ ID NO: 6526 - DNA, 20 bp, Artificial
  Synthetically generated peptide
ccctcccacgcgcgcccgcc

SEQ ID NO: 6527 - DNA, 20 bp, Artificial
  Synthetically generated peptide
accctcccacgcgcgcccgc

SEQ ID NO: 6528 - DNA, 20 bp, Artificial
  Synthetically generated peptide
caccctcccacgcgcgcccg

SEQ ID NO: 6529 - DNA, 20 bp, Artificial
  Synthetically generated peptide
acaccctcccacgcgcgccc

SEQ ID NO: 6530 - DNA, 20 bp, Artificial
  Synthetically generated peptide
gacaccctcccacgcgcgcc

SEQ ID NO: 6531 - DNA, 20 bp, Artificial
  Synthetically generated peptide
ggacaccctcccacgcgcgc

SEQ ID NO: 6532 - DNA, 20 bp, Artificial
  Synthetically generated peptide
gggacaccctcccacgcgcg

SEQ ID NO: 6533 - DNA, 20 bp, Artificial
  Synthetically generated peptide
tgggacaccctcccacgcgc

SEQ ID NO: 6534 - DNA, 20 bp, Artificial
  Synthetically generated peptide
ttgggacaccctcccacgcg

SEQ ID NO: 6535 - DNA, 20 bp, Artificial
  Synthetically generated peptide
cttgggacaccctcccacgc

SEQ ID NO: 6536 - DNA, 20 bp, Artificial
  Synthetically generated peptide
ccttgggacaccctcccacg

SEQ ID NO: 6537 - DNA, 27 bp, Artificial
  Synthetically generated peptide
cgtcattctgttgccctttgtacctcg

SEQ ID NO: 6538 - DNA, 20 bp, Artificial
  Synthetically generated peptide
gcgtcattctgttgcccttt

SEQ ID NO: 6539 - DNA, 20 bp, Artificial
  Synthetically generated peptide
tgcgtcattctgttgccctt

SEQ ID NO: 6540 - DNA, 20 bp, Artificial
  Synthetically generated peptide
atgcgtcattctgttgccct

SEQ ID NO: 6541 - DNA, 20 bp, Artificial
  Synthetically generated peptide
tatgcgtcattctgttgccc

SEQ ID NO: 6542 - DNA, 20 bp, Artificial
  Synthetically generated peptide
gtatgcgtcattctgttgcc

SEQ ID NO: 6543 - DNA, 20 bp, Artificial
  Synthetically generated peptide
tgtatgcgtcattctgttgc

SEQ ID NO: 6544 - DNA, 20 bp, Artificial
  Synthetically generated peptide
gtgtatgcgtcattctgttg

SEQ ID NO: 6545 - DNA, 28 bp, Artificial
  Synthetically generated peptide
cgccacgggcgcatccatccctcctggg

SEQ ID NO: 6546 - DNA, 20 bp, Artificial
  Synthetically generated peptide
gccacgggcgcatccatccc

SEQ ID NO: 6547 - DNA, 20 bp, Artificial
  Synthetically generated peptide
ccacgggcgcatccatccct

SEQ ID NO: 6548 - DNA, 20 bp, Artificial
  Synthetically generated peptide
cacgggcgcatccatccctc

SEQ ID NO: 6549 - DNA, 20 bp, Artificial
  Synthetically generated peptide
acgggcgcatccatccctcc

SEQ ID NO: 6550 - DNA, 20 bp, Artificial
  Synthetically generated peptide
cgggcgcatccatccctcct

SEQ ID NO: 6551 - DNA, 20 bp, Artificial
  Synthetically generated peptide
gggcgcatccatccctcctg

SEQ ID NO: 6552 - DNA, 20 bp, Artificial
  Synthetically generated peptide
ggcgcatccatccctcctgg

SEQ ID NO: 6553 - DNA, 20 bp, Artificial
  Synthetically generated peptide
gcgcatccatccctcctggg

SEQ ID NO: 6554 - DNA, 20 bp, Artificial
  Synthetically generated peptide
cgcatccatccctcctgggc

SEQ ID NO: 6555 - DNA, 20 bp, Artificial
  Synthetically generated peptide
ccgccacgggcgcatccatc

SEQ ID NO: 6556 - DNA, 20 bp, Artificial
  Synthetically generated peptide
accgccacgggcgcatccat

SEQ ID NO: 6557 - DNA, 20 bp, Artificial
  Synthetically generated peptide
caccgccacgggcgcatcca

SEQ ID NO: 6558 - DNA, 20 bp, Artificial
  Synthetically generated peptide
tcaccgccacgggcgcatcc

SEQ ID NO: 6559 - DNA, 20 bp, Artificial
  Synthetically generated peptide
ctcaccgccacgggcgcatc

SEQ ID NO: 6560 - DNA, 20 bp, Artificial
  Synthetically generated peptide
gctcaccgccacgggcgcat

SEQ ID NO: 6561 - DNA, 20 bp, Artificial
  Synthetically generated peptide
agctcaccgccacgggcgca

SEQ ID NO: 6562 - DNA, 20 bp, Artificial
  Synthetically generated peptide
gagctcaccgccacgggcgc

SEQ ID NO: 6563 - DNA, 20 bp, Artificial
  Synthetically generated peptide
tgagctcaccgccacgggcg

SEQ ID NO: 6564 - DNA, 20 bp, Artificial
  Synthetically generated peptide
ctgagctcaccgccacgggc

SEQ ID NO: 6565 - DNA, 20 bp, Artificial
  Synthetically generated peptide
gctgagctcaccgccacggg

SEQ ID NO: 6566 - DNA, 20 bp, Artificial
  Synthetically generated peptide
agctgagctcaccgccacgg

SEQ ID NO: 6567 - DNA, 20 bp, Artificial
  Synthetically generated peptide
cagctgagctcaccgccacg

SEQ ID NO: 6568 - DNA, 20 bp, Artificial
  Synthetically generated peptide
gcagctgagctcaccgccac

SEQ ID NO: 6569 - DNA, 20 bp, Artificial
  Synthetically generated peptide
cgcagctgagctcaccgcca

SEQ ID NO: 6570 - DNA, 20 bp, Artificial
  Synthetically generated peptide
gcgcagctgagctcaccgcc

SEQ ID NO: 6571 - DNA, 20 bp, Artificial
  Synthetically generated peptide
agcgcagctgagctcaccgc

SEQ ID NO: 6572 - DNA, 20 bp, Artificial
  Synthetically generated peptide
cagcgcagctgagctcaccg

SEQ ID NO: 6573 - DNA, 20 bp, Artificial
  Synthetically generated peptide
gcagcgcagctgagctcacc

SEQ ID NO: 6574 - DNA, 20 bp, Artificial
  Synthetically generated peptide
ggcagcgcagctgagctcac

SEQ ID NO: 6575 - DNA, 20 bp, Artificial
  Synthetically generated peptide
gggcagcgcagctgagctca

SEQ ID NO: 6576 - DNA, 20 bp, Artificial
  Synthetically generated peptide
tgggcagcgcagctgagctc

SEQ ID NO: 6577 - DNA, 20 bp, Artificial
  Synthetically generated peptide
gtgggcagcgcagctgagct

SEQ ID NO: 6578 - DNA, 20 bp, Artificial
  Synthetically generated peptide
ggtgggcagcgcagctgagc

SEQ ID NO: 6579 - DNA, 24 bp, Artificial
  Synthetically generated peptide
caccgccctctagccgcctgcggg

SEQ ID NO: 6580 - DNA, 32 bp, Artificial
  Synthetically generated peptide
ttgcggcgactttggttgttgcccgcgacggt

SEQ ID NO: 6581 - DNA, 20 bp, Artificial
  Synthetically generated peptide
tgcggcgactttggttgttg

SEQ ID NO: 6582 - DNA, 20 bp, Artificial
  Synthetically generated peptide
gcggcgactttggttgttgc

SEQ ID NO: 6583 - DNA, 20 bp, Artificial
  Synthetically generated peptide
cggcgactttggttgttgcc

SEQ ID NO: 6584 - DNA, 20 bp, Artificial
  Synthetically generated peptide
ggcgactttggttgttgccc

SEQ ID NO: 6585 - DNA, 20 bp, Artificial
  Synthetically generated peptide
gcgactttggttgttgcccg

SEQ ID NO: 6586 - DNA, 20 bp, Artificial
  Synthetically generated peptide
cgactttggttgttgcccgc

SEQ ID NO: 6587 - DNA, 20 bp, Artificial
  Synthetically generated peptide
gactttggttgttgcccgcg

SEQ ID NO: 6588 - DNA, 20 bp, Artificial
  Synthetically generated peptide
actttggttgttgcccgcga

SEQ ID NO: 6589 - DNA, 20 bp, Artificial
  Synthetically generated peptide
ctttggttgttgcccgcgac

SEQ ID NO: 6590 - DNA, 20 bp, Artificial
  Synthetically generated peptide
tttggttgttgcccgcgacg

SEQ ID NO: 6591 - DNA, 20 bp, Artificial
  Synthetically generated peptide
ttggttgttgcccgcgacgg

SEQ ID NO: 6592 - DNA, 20 bp, Artificial
  Synthetically generated peptide
tggttgttgcccgcgacggt

SEQ ID NO: 6593 - DNA, 20 bp, Artificial
  Synthetically generated peptide
ggttgttgcccgcgacggtg

SEQ ID NO: 6594 - DNA, 20 bp, Artificial
  Synthetically generated peptide
gttgttgcccgcgacggtgg

SEQ ID NO: 6595 - DNA, 20 bp, Artificial
  Synthetically generated peptide
ttgttgcccgcgacggtggg

SEQ ID NO: 6596 - DNA, 20 bp, Artificial
  Synthetically generated peptide
tgttgcccgcgacggtggga

SEQ ID NO: 6597 - DNA, 20 bp, Artificial
  Synthetically generated peptide
gttgcccgcgacggtgggac

SEQ ID NO: 6598 - DNA, 20 bp, Artificial
  Synthetically generated peptide
ttgcccgcgacggtgggacg

SEQ ID NO: 6599 - DNA, 20 bp, Artificial
  Synthetically generated peptide
tgcccgcgacggtgggacgg

SEQ ID NO: 6600 - DNA, 20 bp, Artificial
  Synthetically generated peptide
gcccgcgacggtgggacggg

SEQ ID NO: 6601 - DNA, 20 bp, Artificial
  Synthetically generated peptide
cccgcgacggtgggacggga

SEQ ID NO: 6602 - DNA, 20 bp, Artificial
  Synthetically generated peptide
ccgcgacggtgggacgggac

SEQ ID NO: 6603 - DNA, 20 bp, Artificial
  Synthetically generated peptide
gttgcggcgactttggttgt

SEQ ID NO: 6604 - DNA, 20 bp, Artificial
  Synthetically generated peptide
agttgcggcgactttggttg

SEQ ID NO: 6605 - DNA, 20 bp, Artificial
  Synthetically generated peptide
cagttgcggcgactttggtt

SEQ ID NO: 6606 - DNA, 20 bp, Artificial
  Synthetically generated peptide
gcagttgcggcgactttggt

SEQ ID NO: 6607 - DNA, 20 bp, Artificial
  Synthetically generated peptide
tgcagttgcggcgactttgg

SEQ ID NO: 6608 - DNA, 20 bp, Artificial
  Synthetically generated peptide
ctgcagttgcggcgactttg

SEQ ID NO: 6609 - DNA, 20 bp, Artificial
  Synthetically generated peptide
gctgcagttgcggcgacttt

SEQ ID NO: 6610 - DNA, 20 bp, Artificial
  Synthetically generated peptide
tgctgcagttgcggcgactt

SEQ ID NO: 6611 - DNA, 20 bp, Artificial
  Synthetically generated peptide
gtgctgcagttgcggcgact

SEQ ID NO: 6612 - DNA, 20 bp, Artificial
  Synthetically generated peptide
tgtgctgcagttgcggcgac

SEQ ID NO: 6613 - DNA, 20 bp, Artificial
  Synthetically generated peptide
ctgtgctgcagttgcggcga

SEQ ID NO: 6614 - DNA, 20 bp, Artificial
  Synthetically generated peptide
tctgtgctgcagttgcggcg

SEQ ID NO: 6615 - DNA, 20 bp, Artificial
  Synthetically generated peptide
ctctgtgctgcagttgcggc

SEQ ID NO: 6616 - DNA, 20 bp, Artificial
  Synthetically generated peptide
gctctgtgctgcagttgcgg

SEQ ID NO: 6617 - DNA, 20 bp, Artificial
  Synthetically generated peptide
cgctctgtgctgcagttgcg

SEQ ID NO: 6618 - DNA, 20 bp, Artificial
  Synthetically generated peptide
ccgctctgtgctgcagttgc

SEQ ID NO: 6619 - DNA, 20 bp, Artificial
  Synthetically generated peptide
cccgctctgtgctgcagttg

SEQ ID NO: 6620 - DNA, 20 bp, Artificial
  Synthetically generated peptide
gcccgctctgtgctgcagtt

SEQ ID NO: 6621 - DNA, 20 bp, Artificial
  Synthetically generated peptide
tgcccgctctgtgctgcagt

SEQ ID NO: 6622 - DNA, 20 bp, Artificial
  Synthetically generated peptide
ttgcccgctctgtgctgcag

SEQ ID NO: 6623 - DNA, 20 bp, Artificial
  Synthetically generated peptide
tttgcccgctctgtgctgca

SEQ ID NO: 6624 - DNA, 20 bp, Artificial
  Synthetically generated peptide
ctttgcccgctctgtgctgc

SEQ ID NO: 6625 - DNA, 20 bp, Artificial
  Synthetically generated peptide
gctttgcccgctctgtgctg

SEQ ID NO: 6626 - DNA, 20 bp, Artificial
  Synthetically generated peptide
ggctttgcccgctctgtgct

SEQ ID NO: 6627 - DNA, 20 bp, Artificial
  Synthetically generated peptide
tggctttgcccgctctgtgc

SEQ ID NO: 6628 - DNA, 20 bp, Artificial
  Synthetically generated peptide
ctggctttgcccgctctgtg

SEQ ID NO: 6629 - DNA, 20 bp, Artificial
  Synthetically generated peptide
cctggctttgcccgctctgt

SEQ ID NO: 6630 - DNA, 20 bp, Artificial
  Synthetically generated peptide
gcctggctttgcccgctctg

SEQ ID NO: 6631 - DNA, 20 bp, Artificial
  Synthetically generated peptide
tgcctggctttgcccgctct

SEQ ID NO: 6632 - DNA, 20 bp, Artificial
  Synthetically generated peptide
ctgcctggctttgcccgctc

SEQ ID NO: 6633 - DNA, 20 bp, Artificial
  Synthetically generated peptide
cctgcctggctttgcccgct

SEQ ID NO: 6634 - DNA, 20 bp, Artificial
  Synthetically generated peptide
gcctgcctggctttgcccgc

SEQ ID NO: 6635 - DNA, 20 bp, Artificial
  Synthetically generated peptide
ggcctgcctggctttgcccg

SEQ ID NO: 6636 - DNA, 28 bp, Artificial
  Synthetically generated peptide
cgtcccgcccacctgctgcctgcagcag

SEQ ID NO: 6637 - DNA, 20 bp, Artificial
  Synthetically generated peptide
gtcccgcccacctgctgcct

SEQ ID NO: 6638 - DNA, 20 bp, Artificial
  Synthetically generated peptide
tcccgcccacctgctgcctg

SEQ ID NO: 6639 - DNA, 20 bp, Artificial
  Synthetically generated peptide
cccgcccacctgctgcctgc

SEQ ID NO: 6640 - DNA, 20 bp, Artificial
  Synthetically generated peptide
ccgcccacctgctgcctgca

SEQ ID NO: 6641 - DNA, 20 bp, Artificial
  Synthetically generated peptide
cgcccacctgctgcctgcag

SEQ ID NO: 6642 - DNA, 20 bp, Artificial
  Synthetically generated peptide
gcgtcccgcccacctgctgc

SEQ ID NO: 6643 - DNA, 20 bp, Artificial
  Synthetically generated peptide
ggcgtcccgcccacctgctg

SEQ ID NO: 6644 - DNA, 20 bp, Artificial
  Synthetically generated peptide
tggcgtcccgcccacctgct

SEQ ID NO: 6645 - DNA, 20 bp, Artificial
  Synthetically generated peptide
ctggcgtcccgcccacctgc

SEQ ID NO: 6646 - DNA, 20 bp, Artificial
  Synthetically generated peptide
gctggcgtcccgcccacctg

SEQ ID NO: 6647 - DNA, 20 bp, Artificial
  Synthetically generated peptide
tgctggcgtcccgcccacct

SEQ ID NO: 6648 - DNA, 20 bp, Artificial
  Synthetically generated peptide
ctgctggcgtcccgcccacc

SEQ ID NO: 6649 - DNA, 20 bp, Artificial
  Synthetically generated peptide
cctgctggcgtcccgcccac

SEQ ID NO: 6650 - DNA, 20 bp, Artificial
  Synthetically generated peptide
gcctgctggcgtcccgccca

SEQ ID NO: 6651 - DNA, 20 bp, Artificial
  Synthetically generated peptide
agcctgctggcgtcccgccc

SEQ ID NO: 6652 - DNA, 20 bp, Artificial
  Synthetically generated peptide
cagcctgctggcgtcccgcc

SEQ ID NO: 6653 - DNA, 20 bp, Artificial
  Synthetically generated peptide
acagcctgctggcgtcccgc

SEQ ID NO: 6654 - DNA, 20 bp, Artificial
  Synthetically generated peptide
gacagcctgctggcgtcccg

SEQ ID NO: 6655 - DNA, 20 bp, Artificial
  Synthetically generated peptide
agacagcctgctggcgtccc

SEQ ID NO: 6656 - DNA, 20 bp, Artificial
  Synthetically generated peptide
tagacagcctgctggcgtcc

SEQ ID NO: 6657 - DNA, 20 bp, Artificial
  Synthetically generated peptide
ctagacagcctgctggcgtc

SEQ ID NO: 6658 - DNA, 20 bp, Artificial
  Synthetically generated peptide
gctagacagcctgctggcgt

SEQ ID NO: 6659 - DNA, 20 bp, Artificial
  Synthetically generated peptide
agctagacagcctgctggcg

SEQ ID NO: 6660 - DNA, 25 bp, Artificial
  Synthetically generated peptide
cgacaatcagcgaggcacacaggct

SEQ ID NO: 6661 - DNA, 20 bp, Artificial
  Synthetically generated peptide
gacaatcagcgaggcacaca

SEQ ID NO: 6662 - DNA, 20 bp, Artificial
  Synthetically generated peptide
acaatcagcgaggcacacag

SEQ ID NO: 6663 - DNA, 20 bp, Artificial
  Synthetically generated peptide
caatcagcgaggcacacagg

SEQ ID NO: 6664 - DNA, 20 bp, Artificial
  Synthetically generated peptide
aatcagcgaggcacacaggc

SEQ ID NO: 6665 - DNA, 20 bp, Artificial
  Synthetically generated peptide
atcagcgaggcacacaggct

SEQ ID NO: 6666 - DNA, 20 bp, Artificial
  Synthetically generated peptide
tcagcgaggcacacaggctt

SEQ ID NO: 6667 - DNA, 20 bp, Artificial
  Synthetically generated peptide
cagcgaggcacacaggcttt

SEQ ID NO: 6668 - DNA, 20 bp, Artificial
  Synthetically generated peptide
agcgaggcacacaggctttc

SEQ ID NO: 6669 - DNA, 20 bp, Artificial
  Synthetically generated peptide
gcgaggcacacaggctttct

SEQ ID NO: 6670 - DNA, 20 bp, Artificial
  Synthetically generated peptide
cgaggcacacaggctttctg

SEQ ID NO: 6671 - DNA, 20 bp, Artificial
  Synthetically generated peptide
ccgacaatcagcgaggcaca

SEQ ID NO: 6672 - DNA, 20 bp, Artificial
  Synthetically generated peptide
cccgacaatcagcgaggcac

SEQ ID NO: 6673 - DNA, 20 bp, Artificial
  Synthetically generated peptide
ccccgacaatcagcgaggca

SEQ ID NO: 6674 - DNA, 20 bp, Artificial
  Synthetically generated peptide
tccccgacaatcagcgaggc

SEQ ID NO: 6675 - DNA, 20 bp, Artificial
  Synthetically generated peptide
ctccccgacaatcagcgagg

SEQ ID NO: 6676 - DNA, 20 bp, Artificial
  Synthetically generated peptide
cctccccgacaatcagcgag

SEQ ID NO: 6677 - DNA, 20 bp, Artificial
  Synthetically generated peptide
tcctccccgacaatcagcga

SEQ ID NO: 6678 - DNA, 20 bp, Artificial
  Synthetically generated peptide
atcctccccgacaatcagcg

SEQ ID NO: 6679 - DNA, 20 bp, Artificial
  Synthetically generated peptide
catcctccccgacaatcagc

SEQ ID NO: 6680 - DNA, 20 bp, Artificial
  Synthetically generated peptide
acatcctccccgacaatcag

SEQ ID NO: 6681 - DNA, 20 bp, Artificial
  Synthetically generated peptide
cacatcctccccgacaatca

SEQ ID NO: 6682 - DNA, 20 bp, Artificial
  Synthetically generated peptide
ccacatcctccccgacaatc

SEQ ID NO: 6683 - DNA, 20 bp, Artificial
  Synthetically generated peptide
gccacatcctccccgacaat

SEQ ID NO: 6684 - DNA, 20 bp, Artificial
  Synthetically generated peptide
agccacatcctccccgacaa

SEQ ID NO: 6685 - DNA, 20 bp, Artificial
  Synthetically generated peptide
aagccacatcctccccgaca

SEQ ID NO: 6686 - DNA, 20 bp, Artificial
  Synthetically generated peptide
caagccacatcctccccgac

SEQ ID NO: 6687 - DNA, 20 bp, Artificial
  Synthetically generated peptide
ccaagccacatcctccccga

SEQ ID NO: 6688 - DNA, 20 bp, Artificial
  Synthetically generated peptide
tccaagccacatcctccccg

SEQ ID NO: 6689 - DNA, 29 bp, Artificial
  Synthetically generated peptide
cggagagtagagagggttcgcagtggccc

SEQ ID NO: 6690 - DNA, 25 bp, Artificial
  Synthetically generated peptide
ccacggggcacaggccatagccccg

SEQ ID NO: 6691 - DNA, 20 bp, Artificial
  Synthetically generated peptide
cacggggcacaggccatagc

SEQ ID NO: 6692 - DNA, 20 bp, Artificial
  Synthetically generated peptide
acggggcacaggccatagcc

SEQ ID NO: 6693 - DNA, 20 bp, Artificial
  Synthetically generated peptide
cggggcacaggccatagccc

SEQ ID NO: 6694 - DNA, 20 bp, Artificial
  Synthetically generated peptide
gccacggggcacaggccata

SEQ ID NO: 6695 - DNA, 20 bp, Artificial
  Synthetically generated peptide
agccacggggcacaggccat

SEQ ID NO: 6696 - DNA, 20 bp, Artificial
  Synthetically generated peptide
gagccacggggcacaggcca

SEQ ID NO: 6697 - DNA, 20 bp, Artificial
  Synthetically generated peptide
tgagccacggggcacaggcc

SEQ ID NO: 6698 - DNA, 20 bp, Artificial
  Synthetically generated peptide
ctgagccacggggcacaggc

SEQ ID NO: 6699 - DNA, 20 bp, Artificial
  Synthetically generated peptide
cctgagccacggggcacagg

SEQ ID NO: 6700 - DNA, 20 bp, Artificial
  Synthetically generated peptide
ccctgagccacggggcacag

SEQ ID NO: 6701 - DNA, 20 bp, Artificial
  Synthetically generated peptide
gccctgagccacggggcaca

SEQ ID NO: 6702 - DNA, 20 bp, Artificial
  Synthetically generated peptide
tgccctgagccacggggcac

SEQ ID NO: 6703 - DNA, 20 bp, Artificial
  Synthetically generated peptide
ctgccctgagccacggggca

SEQ ID NO: 6704 - DNA, 20 bp, Artificial
  Synthetically generated peptide
gctgccctgagccacggggc

SEQ ID NO: 6705 - DNA, 20 bp, Artificial
  Synthetically generated peptide
ggctgccctgagccacgggg

SEQ ID NO: 6706 - DNA, 20 bp, Artificial
  Synthetically generated peptide
tggctgccctgagccacggg

SEQ ID NO: 6707 - DNA, 20 bp, Artificial
  Synthetically generated peptide
ctggctgccctgagccacgg

SEQ ID NO: 6708 - DNA, 20 bp, Artificial
  Synthetically generated peptide
gctggctgccctgagccacg

SEQ ID NO: 6709 - DNA, 28 bp, Artificial
  Synthetically generated peptide
ctcgtgctctcaggcggcggttgcgccg

SEQ ID NO: 6710 - DNA, 20 bp, Artificial
  Synthetically generated peptide
tcgtgctctcaggcggcggt

SEQ ID NO: 6711 - DNA, 20 bp, Artificial
  Synthetically generated peptide
cgtgctctcaggcggcggtt

SEQ ID NO: 6712 - DNA, 20 bp, Artificial
  Synthetically generated peptide
gtgctctcaggcggcggttg

SEQ ID NO: 6713 - DNA, 20 bp, Artificial
  Synthetically generated peptide
tgctctcaggcggcggttgc

SEQ ID NO: 6714 - DNA, 20 bp, Artificial
  Synthetically generated peptide
gctctcaggcggcggttgcg

SEQ ID NO: 6715 - DNA, 20 bp, Artificial
  Synthetically generated peptide
ctctcaggcggcggttgcgc

SEQ ID NO: 6716 - DNA, 20 bp, Artificial
  Synthetically generated peptide
tctcaggcggcggttgcgcc

SEQ ID NO: 6717 - DNA, 20 bp, Artificial
  Synthetically generated peptide
ctcaggcggcggttgcgccg

SEQ ID NO: 6718 - DNA, 20 bp, Artificial
  Synthetically generated peptide
tcaggcggcggttgcgccgg

SEQ ID NO: 6719 - DNA, 20 bp, Artificial
  Synthetically generated peptide
caggcggcggttgcgccggg

SEQ ID NO: 6720 - DNA, 20 bp, Artificial
  Synthetically generated peptide
aggcggcggttgcgccgggg

SEQ ID NO: 6721 - DNA, 20 bp, Artificial
  Synthetically generated peptide
ggcggcggttgcgccggggc

SEQ ID NO: 6722 - DNA, 20 bp, Artificial
  Synthetically generated peptide
gcggcggttgcgccggggcc

SEQ ID NO: 6723 - DNA, 20 bp, Artificial
  Synthetically generated peptide
cggcggttgcgccggggccc

SEQ ID NO: 6724 - DNA, 20 bp, Artificial
  Synthetically generated peptide
ggcggttgcgccggggcccc

SEQ ID NO: 6725 - DNA, 20 bp, Artificial
  Synthetically generated peptide
gcggttgcgccggggcccct

SEQ ID NO: 6726 - DNA, 20 bp, Artificial
  Synthetically generated peptide
cggttgcgccggggcccctg

SEQ ID NO: 6727 - DNA, 20 bp, Artificial
  Synthetically generated peptide
ggttgcgccggggcccctgg

SEQ ID NO: 6728 - DNA, 20 bp, Artificial
  Synthetically generated peptide
gttgcgccggggcccctggc

SEQ ID NO: 6729 - DNA, 20 bp, Artificial
  Synthetically generated peptide
ttgcgccggggcccctggct

SEQ ID NO: 6730 - DNA, 20 bp, Artificial
  Synthetically generated peptide
tgcgccggggcccctggctc

SEQ ID NO: 6731 - DNA, 20 bp, Artificial
  Synthetically generated peptide
gcgccggggcccctggctca

SEQ ID NO: 6732 - DNA, 20 bp, Artificial
  Synthetically generated peptide
cgccggggcccctggctcag

SEQ ID NO: 6733 - DNA, 20 bp, Artificial
  Synthetically generated peptide
gccggggcccctggctcagc

SEQ ID NO: 6734 - DNA, 20 bp, Artificial
  Synthetically generated peptide
ccggggcccctggctcagct

SEQ ID NO: 6735 - DNA, 20 bp, Artificial
  Synthetically generated peptide
cggggcccctggctcagctg

SEQ ID NO: 6736 - DNA, 20 bp, Artificial
  Synthetically generated peptide
gctcgtgctctcaggcggcg

SEQ ID NO: 6737 - DNA, 20 bp, Artificial
  Synthetically generated peptide
agctcgtgctctcaggcggc

SEQ ID NO: 6738 - DNA, 20 bp, Artificial
  Synthetically generated peptide
gagctcgtgctctcaggcgg

SEQ ID NO: 6739 - DNA, 20 bp, Artificial
  Synthetically generated peptide
ggagctcgtgctctcaggcg

SEQ ID NO: 6740 - DNA, 20 bp, Artificial
  Synthetically generated peptide
tggagctcgtgctctcaggc

SEQ ID NO: 6741 - DNA, 20 bp, Artificial
  Synthetically generated peptide
ttggagctcgtgctctcagg

SEQ ID NO: 6742 - DNA, 20 bp, Artificial
  Synthetically generated peptide
gttggagctcgtgctctcag

SEQ ID NO: 6743 - DNA, 20 bp, Artificial
  Synthetically generated peptide
ggttggagctcgtgctctca

SEQ ID NO: 6744 - DNA, 20 bp, Artificial
  Synthetically generated peptide
tggttggagctcgtgctctc

SEQ ID NO: 6745 - DNA, 20 bp, Artificial
  Synthetically generated peptide
gtggttggagctcgtgctct

SEQ ID NO: 6746 - DNA, 20 bp, Artificial
  Synthetically generated peptide
tgtggttggagctcgtgctc

SEQ ID NO: 6747 - DNA, 20 bp, Artificial
  Synthetically generated peptide
ttgtggttggagctcgtgct

SEQ ID NO: 6748 - DNA, 20 bp, Artificial
  Synthetically generated peptide
attgtggttggagctcgtgc

SEQ ID NO: 6749 - DNA, 20 bp, Artificial
  Synthetically generated peptide
aattgtggttggagctcgtg

SEQ ID NO: 6750 - DNA, 20 bp, Artificial
  Synthetically generated peptide
gaattgtggttggagctcgt

SEQ ID NO: 6751 - DNA, 20 bp, Artificial
  Synthetically generated peptide
agaattgtggttggagctcg

SEQ ID NO: 6752 - DNA, 29 bp, Artificial
  Synthetically generated peptide
ccgggaggtgggggccggtgcagcaccgg

SEQ ID NO: 6753 - DNA, 30 bp, Artificial
  Synthetically generated peptide
tcgcgtgcccatctgggagcccctctcacg

SEQ ID NO: 6754 - DNA, 20 bp, Artificial
  Synthetically generated peptide
cgcgtgcccatctgggagcc

SEQ ID NO: 6755 - DNA, 20 bp, Artificial
  Synthetically generated peptide
gcgtgcccatctgggagccc

SEQ ID NO: 6756 - DNA, 20 bp, Artificial
  Synthetically generated peptide
cgtgcccatctgggagcccc

SEQ ID NO: 6757 - DNA, 20 bp, Artificial
  Synthetically generated peptide
ctcgcgtgcccatctgggag

SEQ ID NO: 6758 - DNA, 20 bp, Artificial
  Synthetically generated peptide
actcgcgtgcccatctggga

SEQ ID NO: 6759 - DNA, 20 bp, Artificial
  Synthetically generated peptide
aactcgcgtgcccatctggg

SEQ ID NO: 6760 - DNA, 20 bp, Artificial
  Synthetically generated peptide
gaactcgcgtgcccatctgg

SEQ ID NO: 6761 - DNA, 20 bp, Artificial
  Synthetically generated peptide
tgaactcgcgtgcccatctg

SEQ ID NO: 6762 - DNA, 20 bp, Artificial
  Synthetically generated peptide
ctgaactcgcgtgcccatct

SEQ ID NO: 6763 - DNA, 20 bp, Artificial
  Synthetically generated peptide
cctgaactcgcgtgcccatc

SEQ ID NO: 6764 - DNA, 20 bp, Artificial
  Synthetically generated peptide
gcctgaactcgcgtgcccat

SEQ ID NO: 6765 - DNA, 20 bp, Artificial
  Synthetically generated peptide
agcctgaactcgcgtgccca

SEQ ID NO: 6766 - DNA, 20 bp, Artificial
  Synthetically generated peptide
gagcctgaactcgcgtgccc

SEQ ID NO: 6767 - DNA, 20 bp, Artificial
  Synthetically generated peptide
agagcctgaactcgcgtgcc

SEQ ID NO: 6768 - DNA, 20 bp, Artificial
  Synthetically generated peptide
aagagcctgaactcgcgtgc

SEQ ID NO: 6769 - DNA, 20 bp, Artificial
  Synthetically generated peptide
gaagagcctgaactcgcgtg

SEQ ID NO: 6770 - DNA, 20 bp, Artificial
  Synthetically generated peptide
ggaagagcctgaactcgcgt

SEQ ID NO: 6771 - DNA, 20 bp, Artificial
  Synthetically generated peptide
gggaagagcctgaactcgcg

SEQ ID NO: 6772 - DNA, 20 bp, Artificial
  Synthetically generated peptide
agggaagagcctgaactcgc

SEQ ID NO: 6773 - DNA, 20 bp, Artificial
  Synthetically generated peptide
tagggaagagcctgaactcg

SEQ ID NO: 6774 - DNA, 25 bp, Artificial
  Synthetically generated peptide
ccccgccctcagcctaagcaatgga

SEQ ID NO: 6775 - DNA, 20 bp, Artificial
  Synthetically generated peptide
cccgccctcagcctaagcaa

SEQ ID NO: 6776 - DNA, 20 bp, Artificial
  Synthetically generated peptide
ccgccctcagcctaagcaat

SEQ ID NO: 6777 - DNA, 20 bp, Artificial
  Synthetically generated peptide
cgccctcagcctaagcaatg

SEQ ID NO: 6778 - DNA, 20 bp, Artificial
  Synthetically generated peptide
gccccgccctcagcctaagc

SEQ ID NO: 6779 - DNA, 20 bp, Artificial
  Synthetically generated peptide
ggccccgccctcagcctaag

SEQ ID NO: 6780 - DNA, 20 bp, Artificial
  Synthetically generated peptide
gggccccgccctcagcctaa

SEQ ID NO: 6781 - DNA, 20 bp, Artificial
  Synthetically generated peptide
tgggccccgccctcagccta

SEQ ID NO: 6782 - DNA, 20 bp, Artificial
  Synthetically generated peptide
ttgggccccgccctcagcct

SEQ ID NO: 6783 - DNA, 20 bp, Artificial
  Synthetically generated peptide
cttgggccccgccctcagcc

SEQ ID NO: 6784 - DNA, 20 bp, Artificial
  Synthetically generated peptide
ccttgggccccgccctcagc

SEQ ID NO: 6785 - DNA, 20 bp, Artificial
  Synthetically generated peptide
tccttgggccccgccctcag

SEQ ID NO: 6786 - DNA, 20 bp, Artificial
  Synthetically generated peptide
gtccttgggccccgccctca

SEQ ID NO: 6787 - DNA, 20 bp, Artificial
  Synthetically generated peptide
agtccttgggccccgccctc

SEQ ID NO: 6788 - DNA, 20 bp, Artificial
  Synthetically generated peptide
cagtccttgggccccgccct

SEQ ID NO: 6789 - DNA, 20 bp, Artificial
  Synthetically generated peptide
acagtccttgggccccgccc

SEQ ID NO: 6790 - DNA, 20 bp, Artificial
  Synthetically generated peptide
aacagtccttgggccccgcc

SEQ ID NO: 6791 - DNA, 20 bp, Artificial
  Synthetically generated peptide
caacagtccttgggccccgc

SEQ ID NO: 6792 - DNA, 20 bp, Artificial
  Synthetically generated peptide
tcaacagtccttgggccccg

SEQ ID NO: 6793 - DNA, 26 bp, Artificial
  Synthetically generated peptide
gaccccggaaccgccatgaacagccc

SEQ ID NO: 6794 - DNA, 20 bp, Artificial
  Synthetically generated peptide
accccggaaccgccatgaac

SEQ ID NO: 6795 - DNA, 20 bp, Artificial
  Synthetically generated peptide
ccccggaaccgccatgaaca

SEQ ID NO: 6796 - DNA, 20 bp, Artificial
  Synthetically generated peptide
cccggaaccgccatgaacag

SEQ ID NO: 6797 - DNA, 20 bp, Artificial
  Synthetically generated peptide
ccggaaccgccatgaacagc

SEQ ID NO: 6798 - DNA, 20 bp, Artificial
  Synthetically generated peptide
cggaaccgccatgaacagcc

SEQ ID NO: 6799 - DNA, 20 bp, Artificial
  Synthetically generated peptide
ggaaccgccatgaacagccc

SEQ ID NO: 6800 - DNA, 20 bp, Artificial
  Synthetically generated peptide
gaaccgccatgaacagcccc

SEQ ID NO: 6801 - DNA, 20 bp, Artificial
  Synthetically generated peptide
aaccgccatgaacagccccc

SEQ ID NO: 6802 - DNA, 20 bp, Artificial
  Synthetically generated peptide
accgccatgaacagccccca

SEQ ID NO: 6803 - DNA, 20 bp, Artificial
  Synthetically generated peptide
ccgccatgaacagcccccac

SEQ ID NO: 6804 - DNA, 20 bp, Artificial
  Synthetically generated peptide
cgccatgaacagcccccacc

SEQ ID NO: 6805 - DNA, 20 bp, Artificial
  Synthetically generated peptide
agaccccggaaccgccatga

SEQ ID NO: 6806 - DNA, 20 bp, Artificial
  Synthetically generated peptide
gagaccccggaaccgccatg

SEQ ID NO: 6807 - DNA, 20 bp, Artificial
  Synthetically generated peptide
ggagaccccggaaccgccat

SEQ ID NO: 6808 - DNA, 20 bp, Artificial
  Synthetically generated peptide
tggagaccccggaaccgcca

SEQ ID NO: 6809 - DNA, 20 bp, Artificial
  Synthetically generated peptide
ttggagaccccggaaccgcc

SEQ ID NO: 6810 - DNA, 20 bp, Artificial
  Synthetically generated peptide
gttggagaccccggaaccgc

SEQ ID NO: 6811 - DNA, 20 bp, Artificial
  Synthetically generated peptide
tgttggagaccccggaaccg

SEQ ID NO: 6812 - DNA, 20 bp, Artificial
  Synthetically generated peptide
atgttggagaccccggaacc

SEQ ID NO: 6813 - DNA, 20 bp, Artificial
  Synthetically generated peptide
aatgttggagaccccggaac

SEQ ID NO: 6814 - DNA, 20 bp, Artificial
  Synthetically generated peptide
aaatgttggagaccccggaa

SEQ ID NO: 6815 - DNA, 20 bp, Artificial
  Synthetically generated peptide
aaaatgttggagaccccgga

SEQ ID NO: 6816 - DNA, 20 bp, Artificial
  Synthetically generated peptide
aaaaatgttggagaccccgg

SEQ ID NO: 6817 - DNA, 20 bp, Artificial
  Synthetically generated peptide
gaaaaatgttggagaccccg

SEQ ID NO: 6818 - DNA, 27 bp, Artificial
  Synthetically generated peptide
cccgctacgtaatcagtcggcgcccca

SEQ ID NO: 6819 - DNA, 20 bp, Artificial
  Synthetically generated peptide
ccgctacgtaatcagtcggc

SEQ ID NO: 6820 - DNA, 20 bp, Artificial
  Synthetically generated peptide
cgctacgtaatcagtcggcg

SEQ ID NO: 6821 - DNA, 20 bp, Artificial
  Synthetically generated peptide
gctacgtaatcagtcggcgc

SEQ ID NO: 6822 - DNA, 20 bp, Artificial
  Synthetically generated peptide
ctacgtaatcagtcggcgcc

SEQ ID NO: 6823 - DNA, 20 bp, Artificial
  Synthetically generated peptide
tacgtaatcagtcggcgccc

SEQ ID NO: 6824 - DNA, 20 bp, Artificial
  Synthetically generated peptide
acgtaatcagtcggcgcccc

SEQ ID NO: 6825 - DNA, 20 bp, Artificial
  Synthetically generated peptide
cgtaatcagtcggcgcccca

SEQ ID NO: 6826 - DNA, 20 bp, Artificial
  Synthetically generated peptide
gtaatcagtcggcgccccag

SEQ ID NO: 6827 - DNA, 20 bp, Artificial
  Synthetically generated peptide
taatcagtcggcgccccagg

SEQ ID NO: 6828 - DNA, 20 bp, Artificial
  Synthetically generated peptide
aatcagtcggcgccccaggc

SEQ ID NO: 6829 - DNA, 20 bp, Artificial
  Synthetically generated peptide
atcagtcggcgccccaggcg

SEQ ID NO: 6830 - DNA, 20 bp, Artificial
  Synthetically generated peptide
tcagtcggcgccccaggcgc

SEQ ID NO: 6831 - DNA, 20 bp, Artificial
  Synthetically generated peptide
cagtcggcgccccaggcgcc

SEQ ID NO: 6832 - DNA, 20 bp, Artificial
  Synthetically generated peptide
agtcggcgccccaggcgcct

SEQ ID NO: 6833 - DNA, 20 bp, Artificial
  Synthetically generated peptide
gtcggcgccccaggcgcctg

SEQ ID NO: 6834 - DNA, 20 bp, Artificial
  Synthetically generated peptide
tcggcgccccaggcgcctga

SEQ ID NO: 6835 - DNA, 20 bp, Artificial
  Synthetically generated peptide
cggcgccccaggcgcctgag

SEQ ID NO: 6836 - DNA, 20 bp, Artificial
  Synthetically generated peptide
ggcgccccaggcgcctgagt

SEQ ID NO: 6837 - DNA, 20 bp, Artificial
  Synthetically generated peptide
gcgccccaggcgcctgagtc

SEQ ID NO: 6838 - DNA, 20 bp, Artificial
  Synthetically generated peptide
cgccccaggcgcctgagtcc

SEQ ID NO: 6839 - DNA, 20 bp, Artificial
  Synthetically generated peptide
gccccaggcgcctgagtccc

SEQ ID NO: 6840 - DNA, 20 bp, Artificial
  Synthetically generated peptide
ccccaggcgcctgagtcccc

SEQ ID NO: 6841 - DNA, 20 bp, Artificial
  Synthetically generated peptide
cccaggcgcctgagtccccg

SEQ ID NO: 6842 - DNA, 20 bp, Artificial
  Synthetically generated peptide
ccaggcgcctgagtccccgc

SEQ ID NO: 6843 - DNA, 20 bp, Artificial
  Synthetically generated peptide
caggcgcctgagtccccgcc

SEQ ID NO: 6844 - DNA, 20 bp, Artificial
  Synthetically generated peptide
aggcgcctgagtccccgccc

SEQ ID NO: 6845 - DNA, 20 bp, Artificial
  Synthetically generated peptide
ggcgcctgagtccccgcccc

SEQ ID NO: 6846 - DNA, 20 bp, Artificial
  Synthetically generated peptide
gcgcctgagtccccgccccg

SEQ ID NO: 6847 - DNA, 20 bp, Artificial
  Synthetically generated peptide
cgcctgagtccccgccccgg

SEQ ID NO: 6848 - DNA, 20 bp, Artificial
  Synthetically generated peptide
gcctgagtccccgccccggc

SEQ ID NO: 6849 - DNA, 20 bp, Artificial
  Synthetically generated peptide
cctgagtccccgccccggcc

SEQ ID NO: 6850 - DNA, 20 bp, Artificial
  Synthetically generated peptide
ctgagtccccgccccggcca

SEQ ID NO: 6851 - DNA, 20 bp, Artificial
  Synthetically generated peptide
tgagtccccgccccggccac

SEQ ID NO: 6852 - DNA, 20 bp, Artificial
  Synthetically generated peptide
gagtccccgccccggccacg

SEQ ID NO: 6853 - DNA, 20 bp, Artificial
  Synthetically generated peptide
agtccccgccccggccacgt

SEQ ID NO: 6854 - DNA, 20 bp, Artificial
  Synthetically generated peptide
gtccccgccccggccacgtg

SEQ ID NO: 6855 - DNA, 20 bp, Artificial
  Synthetically generated peptide
tccccgccccggccacgtgg

SEQ ID NO: 6856 - DNA, 20 bp, Artificial
  Synthetically generated peptide
ccccgccccggccacgtggg

SEQ ID NO: 6857 - DNA, 20 bp, Artificial
  Synthetically generated peptide
cccgccccggccacgtgggc

SEQ ID NO: 6858 - DNA, 20 bp, Artificial
  Synthetically generated peptide
ccgccccggccacgtgggcc

SEQ ID NO: 6859 - DNA, 20 bp, Artificial
  Synthetically generated peptide
cgccccggccacgtgggcct

SEQ ID NO: 6860 - DNA, 20 bp, Artificial
  Synthetically generated peptide
gccccggccacgtgggcctc

SEQ ID NO: 6861 - DNA, 20 bp, Artificial
  Synthetically generated peptide
ccccggccacgtgggcctcc

SEQ ID NO: 6862 - DNA, 20 bp, Artificial
  Synthetically generated peptide
cccggccacgtgggcctccg

SEQ ID NO: 6863 - DNA, 20 bp, Artificial
  Synthetically generated peptide
ccggccacgtgggcctccga

SEQ ID NO: 6864 - DNA, 20 bp, Artificial
  Synthetically generated peptide
cggccacgtgggcctccgaa

SEQ ID NO: 6865 - DNA, 20 bp, Artificial
  Synthetically generated peptide
ggccacgtgggcctccgaac

SEQ ID NO: 6866 - DNA, 20 bp, Artificial
  Synthetically generated peptide
gccacgtgggcctccgaacc

SEQ ID NO: 6867 - DNA, 20 bp, Artificial
  Synthetically generated peptide
ccacgtgggcctccgaacca

SEQ ID NO: 6868 - DNA, 20 bp, Artificial
  Synthetically generated peptide
cacgtgggcctccgaaccac

SEQ ID NO: 6869 - DNA, 20 bp, Artificial
  Synthetically generated peptide
acgtgggcctccgaaccacg

SEQ ID NO: 6870 - DNA, 20 bp, Artificial
  Synthetically generated peptide
cgtgggcctccgaaccacga

SEQ ID NO: 6871 - DNA, 20 bp, Artificial
  Synthetically generated peptide
gtgggcctccgaaccacgag

SEQ ID NO: 6872 - DNA, 20 bp, Artificial
  Synthetically generated peptide
tgggcctccgaaccacgagt

SEQ ID NO: 6873 - DNA, 20 bp, Artificial
  Synthetically generated peptide
gggcctccgaaccacgagtc

SEQ ID NO: 6874 - DNA, 20 bp, Artificial
  Synthetically generated peptide
ggcctccgaaccacgagtca

SEQ ID NO: 6875 - DNA, 20 bp, Artificial
  Synthetically generated peptide
gcctccgaaccacgagtcat

SEQ ID NO: 6876 - DNA, 20 bp, Artificial
  Synthetically generated peptide
cctccgaaccacgagtcatg

SEQ ID NO: 6877 - DNA, 20 bp, Artificial
  Synthetically generated peptide
ctccgaaccacgagtcatgc

SEQ ID NO: 6878 - DNA, 20 bp, Artificial
  Synthetically generated peptide
tccgaaccacgagtcatgcg

SEQ ID NO: 6879 - DNA, 20 bp, Artificial
  Synthetically generated peptide
ccgaaccacgagtcatgcgg

SEQ ID NO: 6880 - DNA, 20 bp, Artificial
  Synthetically generated peptide
cgaaccacgagtcatgcggc

SEQ ID NO: 6881 - DNA, 20 bp, Artificial
  Synthetically generated peptide
gaaccacgagtcatgcggca

SEQ ID NO: 6882 - DNA, 20 bp, Artificial
  Synthetically generated peptide
aaccacgagtcatgcggcag

SEQ ID NO: 6883 - DNA, 20 bp, Artificial
  Synthetically generated peptide
accacgagtcatgcggcagg

SEQ ID NO: 6884 - DNA, 20 bp, Artificial
  Synthetically generated peptide
ccacgagtcatgcggcaggc

SEQ ID NO: 6885 - DNA, 20 bp, Artificial
  Synthetically generated peptide
cacgagtcatgcggcaggcc

SEQ ID NO: 6886 - DNA, 20 bp, Artificial
  Synthetically generated peptide
acgagtcatgcggcaggccg

SEQ ID NO: 6887 - DNA, 20 bp, Artificial
  Synthetically generated peptide
cgagtcatgcggcaggccgc

SEQ ID NO: 6888 - DNA, 20 bp, Artificial
  Synthetically generated peptide
gagtcatgcggcaggccgca

SEQ ID NO: 6889 - DNA, 20 bp, Artificial
  Synthetically generated peptide
agtcatgcggcaggccgcac

SEQ ID NO: 6890 - DNA, 20 bp, Artificial
  Synthetically generated peptide
gtcatgcggcaggccgcacc

SEQ ID NO: 6891 - DNA, 20 bp, Artificial
  Synthetically generated peptide
tcatgcggcaggccgcaccc

SEQ ID NO: 6892 - DNA, 20 bp, Artificial
  Synthetically generated peptide
catgcggcaggccgcaccca

SEQ ID NO: 6893 - DNA, 20 bp, Artificial
  Synthetically generated peptide
atgcggcaggccgcacccag

SEQ ID NO: 6894 - DNA, 20 bp, Artificial
  Synthetically generated peptide
tgcggcaggccgcacccaga

SEQ ID NO: 6895 - DNA, 20 bp, Artificial
  Synthetically generated peptide
gcggcaggccgcacccagac

SEQ ID NO: 6896 - DNA, 20 bp, Artificial
  Synthetically generated peptide
cggcaggccgcacccagacc

SEQ ID NO: 6897 - DNA, 20 bp, Artificial
  Synthetically generated peptide
ggcaggccgcacccagaccc

SEQ ID NO: 6898 - DNA, 20 bp, Artificial
  Synthetically generated peptide
gcaggccgcacccagacccg

SEQ ID NO: 6899 - DNA, 20 bp, Artificial
  Synthetically generated peptide
caggccgcacccagacccgc

SEQ ID NO: 6900 - DNA, 20 bp, Artificial
  Synthetically generated peptide
aggccgcacccagacccgcc

SEQ ID NO: 6901 - DNA, 20 bp, Artificial
  Synthetically generated peptide
ggccgcacccagacccgccc

SEQ ID NO: 6902 - DNA, 20 bp, Artificial
  Synthetically generated peptide
gccgcacccagacccgcccc

SEQ ID NO: 6903 - DNA, 20 bp, Artificial
  Synthetically generated peptide
ccgcacccagacccgcccct

SEQ ID NO: 6904 - DNA, 20 bp, Artificial
  Synthetically generated peptide
cgcacccagacccgcccctc

SEQ ID NO: 6905 - DNA, 20 bp, Artificial
  Synthetically generated peptide
gcacccagacccgcccctcc

SEQ ID NO: 6906 - DNA, 20 bp, Artificial
  Synthetically generated peptide
cacccagacccgcccctccc

SEQ ID NO: 6907 - DNA, 20 bp, Artificial
  Synthetically generated peptide
acccagacccgcccctccca

SEQ ID NO: 6908 - DNA, 20 bp, Artificial
  Synthetically generated peptide
cccagacccgcccctcccac

SEQ ID NO: 6909 - DNA, 20 bp, Artificial
  Synthetically generated peptide
ccagacccgcccctcccaca

SEQ ID NO: 6910 - DNA, 20 bp, Artificial
  Synthetically generated peptide
cagacccgcccctcccacac

SEQ ID NO: 6911 - DNA, 20 bp, Artificial
  Synthetically generated peptide
agacccgcccctcccacacg

SEQ ID NO: 6912 - DNA, 20 bp, Artificial
  Synthetically generated peptide
gacccgcccctcccacacgg

SEQ ID NO: 6913 - DNA, 20 bp, Artificial
  Synthetically generated peptide
acccgcccctcccacacggg

SEQ ID NO: 6914 - DNA, 20 bp, Artificial
  Synthetically generated peptide
cccgcccctcccacacggga

SEQ ID NO: 6915 - DNA, 20 bp, Artificial
  Synthetically generated peptide
ccgcccctcccacacgggac

SEQ ID NO: 6916 - DNA, 20 bp, Artificial
  Synthetically generated peptide
cgcccctcccacacgggacg

SEQ ID NO: 6917 - DNA, 20 bp, Artificial
  Synthetically generated peptide
gcccctcccacacgggacgt

SEQ ID NO: 6918 - DNA, 20 bp, Artificial
  Synthetically generated peptide
cccctcccacacgggacgtt

SEQ ID NO: 6919 - DNA, 20 bp, Artificial
  Synthetically generated peptide
ccctcccacacgggacgttt

SEQ ID NO: 6920 - DNA, 20 bp, Artificial
  Synthetically generated peptide
cctcccacacgggacgtttc

SEQ ID NO: 6921 - DNA, 20 bp, Artificial
  Synthetically generated peptide
ctcccacacgggacgtttca

SEQ ID NO: 6922 - DNA, 20 bp, Artificial
  Synthetically generated peptide
tcccacacgggacgtttcaa

SEQ ID NO: 6923 - DNA, 20 bp, Artificial
  Synthetically generated peptide
cccacacgggacgtttcaat

SEQ ID NO: 6924 - DNA, 20 bp, Artificial
  Synthetically generated peptide
ccacacgggacgtttcaata

SEQ ID NO: 6925 - DNA, 20 bp, Artificial
  Synthetically generated peptide
cacacgggacgtttcaataa

SEQ ID NO: 6926 - DNA, 20 bp, Artificial
  Synthetically generated peptide
gcccgctacgtaatcagtcg

SEQ ID NO: 6927 - DNA, 20 bp, Artificial
  Synthetically generated peptide
cgcccgctacgtaatcagtc

SEQ ID NO: 6928 - DNA, 20 bp, Artificial
  Synthetically generated peptide
ccgcccgctacgtaatcagt

SEQ ID NO: 6929 - DNA, 20 bp, Artificial
  Synthetically generated peptide
cccgcccgctacgtaatcag

SEQ ID NO: 6930 - DNA, 20 bp, Artificial
  Synthetically generated peptide
ccccgcccgctacgtaatca

SEQ ID NO: 6931 - DNA, 20 bp, Artificial
  Synthetically generated peptide
gccccgcccgctacgtaatc

SEQ ID NO: 6932 - DNA, 20 bp, Artificial
  Synthetically generated peptide
ggccccgcccgctacgtaat

SEQ ID NO: 6933 - DNA, 20 bp, Artificial
  Synthetically generated peptide
cggccccgcccgctacgtaa

SEQ ID NO: 6934 - DNA, 20 bp, Artificial
  Synthetically generated peptide
ccggccccgcccgctacgta

SEQ ID NO: 6935 - DNA, 20 bp, Artificial
  Synthetically generated peptide
tccggccccgcccgctacgt

SEQ ID NO: 6936 - DNA, 20 bp, Artificial
  Synthetically generated peptide
ttccggccccgcccgctacg

SEQ ID NO: 6937 - DNA, 20 bp, Artificial
  Synthetically generated peptide
cttccggccccgcccgctac

SEQ ID NO: 6938 - DNA, 20 bp, Artificial
  Synthetically generated peptide
acttccggccccgcccgcta

SEQ ID NO: 6939 - DNA, 20 bp, Artificial
  Synthetically generated peptide
cacttccggccccgcccgct

SEQ ID NO: 6940 - DNA, 20 bp, Artificial
  Synthetically generated peptide
gcacttccggccccgcccgc

SEQ ID NO: 6941 - DNA, 20 bp, Artificial
  Synthetically generated peptide
ggcacttccggccccgcccg

SEQ ID NO: 6942 - DNA, 20 bp, Artificial
  Synthetically generated peptide
cggcacttccggccccgccc

SEQ ID NO: 6943 - DNA, 20 bp, Artificial
  Synthetically generated peptide
gcggcacttccggccccgcc

SEQ ID NO: 6944 - DNA, 20 bp, Artificial
  Synthetically generated peptide
agcggcacttccggccccgc

SEQ ID NO: 6945 - DNA, 20 bp, Artificial
  Synthetically generated peptide
gagcggcacttccggccccg

SEQ ID NO: 6946 - DNA, 20 bp, Artificial
  Synthetically generated peptide
ggagcggcacttccggcccc

SEQ ID NO: 6947 - DNA, 20 bp, Artificial
  Synthetically generated peptide
aggagcggcacttccggccc

SEQ ID NO: 6948 - DNA, 20 bp, Artificial
  Synthetically generated peptide
aaggagcggcacttccggcc

SEQ ID NO: 6949 - DNA, 20 bp, Artificial
  Synthetically generated peptide
caaggagcggcacttccggc

SEQ ID NO: 6950 - DNA, 20 bp, Artificial
  Synthetically generated peptide
ccaaggagcggcacttccgg

SEQ ID NO: 6951 - DNA, 20 bp, Artificial
  Synthetically generated peptide
accaaggagcggcacttccg

SEQ ID NO: 6952 - DNA, 20 bp, Artificial
  Synthetically generated peptide
caccaaggagcggcacttcc

SEQ ID NO: 6953 - DNA, 20 bp, Artificial
  Synthetically generated peptide
ccaccaaggagcggcacttc

SEQ ID NO: 6954 - DNA, 20 bp, Artificial
  Synthetically generated peptide
cccaccaaggagcggcactt

SEQ ID NO: 6955 - DNA, 20 bp, Artificial
  Synthetically generated peptide
ccccaccaaggagcggcact

SEQ ID NO: 6956 - DNA, 20 bp, Artificial
  Synthetically generated peptide
cccccaccaaggagcggcac

SEQ ID NO: 6957 - DNA, 20 bp, Artificial
  Synthetically generated peptide
gcccccaccaaggagcggca

SEQ ID NO: 6958 - DNA, 20 bp, Artificial
  Synthetically generated peptide
agcccccaccaaggagcggc

SEQ ID NO: 6959 - DNA, 20 bp, Artificial
  Synthetically generated peptide
cagcccccaccaaggagcgg

SEQ ID NO: 6960 - DNA, 20 bp, Artificial
  Synthetically generated peptide
acagcccccaccaaggagcg

SEQ ID NO: 6961 - DNA, 30 bp, Artificial
  Synthetically generated peptide
aacgcaaaaacaccggattaatatcggcct

SEQ ID NO: 6962 - DNA, 20 bp, Artificial
  Synthetically generated peptide
gaacgcaaaaacaccggatt

SEQ ID NO: 6963 - DNA, 27 bp, Artificial
  Synthetically generated peptide
ataaacggcctctttacccagagatca

SEQ ID NO: 6964 - DNA, 20 bp, Artificial
  Synthetically generated peptide
taaacggcctctttacccag

SEQ ID NO: 6965 - DNA, 20 bp, Artificial
  Synthetically generated peptide
aaacggcctctttacccaga

SEQ ID NO: 6966 - DNA, 20 bp, Artificial
  Synthetically generated peptide
aacggcctctttacccagag

SEQ ID NO: 6967 - DNA, 20 bp, Artificial
  Synthetically generated peptide
acggcctctttacccagaga

SEQ ID NO: 6968 - DNA, 20 bp, Artificial
  Synthetically generated peptide
cggcctctttacccagagat

SEQ ID NO: 6969 - DNA, 20 bp, Artificial
  Synthetically generated peptide
gataaacggcctctttaccc

SEQ ID NO: 6970 - DNA, 20 bp, Artificial
  Synthetically generated peptide
agataaacggcctctttacc

SEQ ID NO: 6971 - DNA, 26 bp, Artificial
  Synthetically generated peptide
cgccaccttaagtttttccaggctgc

SEQ ID NO: 6972 - DNA, 20 bp, Artificial
  Synthetically generated peptide
gcgccaccttaagtttttcc

SEQ ID NO: 6973 - DNA, 20 bp, Artificial
  Synthetically generated peptide
ggcgccaccttaagtttttc

SEQ ID NO: 6974 - DNA, 20 bp, Artificial
  Synthetically generated peptide
aggcgccaccttaagttttt

SEQ ID NO: 6975 - DNA, 20 bp, Artificial
  Synthetically generated peptide
aaggcgccaccttaagtttt

SEQ ID NO: 6976 - DNA, 20 bp, Artificial
  Synthetically generated peptide
taaggcgccaccttaagttt

SEQ ID NO: 6977 - DNA, 20 bp, Artificial
  Synthetically generated peptide
ataaggcgccaccttaagtt

SEQ ID NO: 6978 - DNA, 20 bp, Artificial
  Synthetically generated peptide
tataaggcgccaccttaagt

SEQ ID NO: 6979 - DNA, 20 bp, Artificial
  Synthetically generated peptide
ctataaggcgccaccttaag

SEQ ID NO: 6980 - DNA, 20 bp, Artificial
  Synthetically generated peptide
actataaggcgccaccttaa

SEQ ID NO: 6981 - DNA, 20 bp, Artificial
  Synthetically generated peptide
tactataaggcgccacctta

SEQ ID NO: 6982 - DNA, 20 bp, Artificial
  Synthetically generated peptide
atactataaggcgccacctt

SEQ ID NO: 6983 - DNA, 20 bp, Artificial
  Synthetically generated peptide
gatactataaggcgccacct

SEQ ID NO: 6984 - DNA, 20 bp, Artificial
  Synthetically generated peptide
tgatactataaggcgccacc

SEQ ID NO: 6985 - DNA, 20 bp, Artificial
  Synthetically generated peptide
ttgatactataaggcgccac

SEQ ID NO: 6986 - DNA, 23 bp, Artificial
  Synthetically generated peptide
tcccgacaaggggtgacagaggc

SEQ ID NO: 6987 - DNA, 20 bp, Artificial
  Synthetically generated peptide
atcccgacaaggggtgacag

SEQ ID NO: 6988 - DNA, 20 bp, Artificial
  Synthetically generated peptide
catcccgacaaggggtgaca

SEQ ID NO: 6989 - DNA, 20 bp, Artificial
  Synthetically generated peptide
gcatcccgacaaggggtgac

SEQ ID NO: 6990 - DNA, 20 bp, Artificial
  Synthetically generated peptide
agcatcccgacaaggggtga

SEQ ID NO: 6991 - DNA, 20 bp, Artificial
  Synthetically generated peptide
cagcatcccgacaaggggtg

SEQ ID NO: 6992 - DNA, 20 bp, Artificial
  Synthetically generated peptide
acagcatcccgacaaggggt

SEQ ID NO: 6993 - DNA, 20 bp, Artificial
  Synthetically generated peptide
cacagcatcccgacaagggg

SEQ ID NO: 6994 - DNA, 20 bp, Artificial
  Synthetically generated peptide
gcacagcatcccgacaaggg

SEQ ID NO: 6995 - DNA, 20 bp, Artificial
  Synthetically generated peptide
agcacagcatcccgacaagg

SEQ ID NO: 6996 - DNA, 20 bp, Artificial
  Synthetically generated peptide
cagcacagcatcccgacaag

SEQ ID NO: 6997 - DNA, 20 bp, Artificial
  Synthetically generated peptide
gcagcacagcatcccgacaa

SEQ ID NO: 6998 - DNA, 20 bp, Artificial
  Synthetically generated peptide
tgcagcacagcatcccgaca

SEQ ID NO: 6999 - DNA, 20 bp, Artificial
  Synthetically generated peptide
ctgcagcacagcatcccgac

SEQ ID NO: 7000 - DNA, 20 bp, Artificial
  Synthetically generated peptide
gctgcagcacagcatcccga

SEQ ID NO: 7001 - DNA, 20 bp, Artificial
  Synthetically generated peptide
tgctgcagcacagcatcccg

SEQ ID NO: 7002 - DNA, 25 bp, Artificial
  Synthetically generated peptide
cgtgaattcaagagttgcttaggcc

SEQ ID NO: 7003 - DNA, 29 bp, Artificial
  Synthetically generated peptide
gactaccggtgcccgccaccacgccaggc

SEQ ID NO: 7004 - DNA, 20 bp, Artificial
  Synthetically generated peptide
actaccggtgcccgccacca

SEQ ID NO: 7005 - DNA, 20 bp, Artificial
  Synthetically generated peptide
ctaccggtgcccgccaccac

SEQ ID NO: 7006 - DNA, 20 bp, Artificial
  Synthetically generated peptide
taccggtgcccgccaccacg

SEQ ID NO: 7007 - DNA, 20 bp, Artificial
  Synthetically generated peptide
accggtgcccgccaccacgc

SEQ ID NO: 7008 - DNA, 20 bp, Artificial
  Synthetically generated peptide
ccggtgcccgccaccacgcc

SEQ ID NO: 7009 - DNA, 20 bp, Artificial
  Synthetically generated peptide
cggtgcccgccaccacgcca

SEQ ID NO: 7010 - DNA, 20 bp, Artificial
  Synthetically generated peptide
ggtgcccgccaccacgccag

SEQ ID NO: 7011 - DNA, 20 bp, Artificial
  Synthetically generated peptide
gtgcccgccaccacgccagg

SEQ ID NO: 7012 - DNA, 20 bp, Artificial
  Synthetically generated peptide
tgcccgccaccacgccaggc

SEQ ID NO: 7013 - DNA, 20 bp, Artificial
  Synthetically generated peptide
gcccgccaccacgccaggct

SEQ ID NO: 7014 - DNA, 20 bp, Artificial
  Synthetically generated peptide
cccgccaccacgccaggcta

SEQ ID NO: 7015 - DNA, 20 bp, Artificial
  Synthetically generated peptide
ccgccaccacgccaggctaa

SEQ ID NO: 7016 - DNA, 20 bp, Artificial
  Synthetically generated peptide
cgccaccacgccaggctaat

SEQ ID NO: 7017 - DNA, 20 bp, Artificial
  Synthetically generated peptide
gccaccacgccaggctaatt

SEQ ID NO: 7018 - DNA, 20 bp, Artificial
  Synthetically generated peptide
ccaccacgccaggctaattt

SEQ ID NO: 7019 - DNA, 20 bp, Artificial
  Synthetically generated peptide
caccacgccaggctaatttt

SEQ ID NO: 7020 - DNA, 20 bp, Artificial
  Synthetically generated peptide
accacgccaggctaattttt

SEQ ID NO: 7021 - DNA, 20 bp, Artificial
  Synthetically generated peptide
ccacgccaggctaatttttt

SEQ ID NO: 7022 - DNA, 20 bp, Artificial
  Synthetically generated peptide
cacgccaggctaattttttg

SEQ ID NO: 7023 - DNA, 20 bp, Artificial
  Synthetically generated peptide
ggactaccggtgcccgccac

SEQ ID NO: 7024 - DNA, 20 bp, Artificial
  Synthetically generated peptide
gggactaccggtgcccgcca

SEQ ID NO: 7025 - DNA, 20 bp, Artificial
  Synthetically generated peptide
tgggactaccggtgcccgcc

SEQ ID NO: 7026 - DNA, 20 bp, Artificial
  Synthetically generated peptide
gtgggactaccggtgcccgc

SEQ ID NO: 7027 - DNA, 20 bp, Artificial
  Synthetically generated peptide
ggtgggactaccggtgcccg

SEQ ID NO: 7028 - DNA, 20 bp, Artificial
  Synthetically generated peptide
aggtgggactaccggtgccc

SEQ ID NO: 7029 - DNA, 20 bp, Artificial
  Synthetically generated peptide
taggtgggactaccggtgcc

SEQ ID NO: 7030 - DNA, 20 bp, Artificial
  Synthetically generated peptide
gtaggtgggactaccggtgc

SEQ ID NO: 7031 - DNA, 20 bp, Artificial
  Synthetically generated peptide
agtaggtgggactaccggtg

SEQ ID NO: 7032 - DNA, 20 bp, Artificial
  Synthetically generated peptide
aagtaggtgggactaccggt

SEQ ID NO: 7033 - DNA, 20 bp, Artificial
  Synthetically generated peptide
caagtaggtgggactaccgg

SEQ ID NO: 7034 - DNA, 20 bp, Artificial
  Synthetically generated peptide
ccaagtaggtgggactaccg

SEQ ID NO: 7035 - DNA, 27 bp, Artificial
  Synthetically generated peptide
gaccgccccccgccaaccccacagcgg

SEQ ID NO: 7036 - DNA, 20 bp, Artificial
  Synthetically generated peptide
accgccccccgccaacccca

SEQ ID NO: 7037 - DNA, 20 bp, Artificial
  Synthetically generated peptide
ccgccccccgccaaccccac

SEQ ID NO: 7038 - DNA, 20 bp, Artificial
  Synthetically generated peptide
cgccccccgccaaccccaca

SEQ ID NO: 7039 - DNA, 20 bp, Artificial
  Synthetically generated peptide
gccccccgccaaccccacag

SEQ ID NO: 7040 - DNA, 20 bp, Artificial
  Synthetically generated peptide
ccccccgccaaccccacagc

SEQ ID NO: 7041 - DNA, 20 bp, Artificial
  Synthetically generated peptide
cccccgccaaccccacagcg

SEQ ID NO: 7042 - DNA, 20 bp, Artificial
  Synthetically generated peptide
ccccgccaaccccacagcgg

SEQ ID NO: 7043 - DNA, 20 bp, Artificial
  Synthetically generated peptide
cccgccaaccccacagcgga

SEQ ID NO: 7044 - DNA, 20 bp, Artificial
  Synthetically generated peptide
ccgccaaccccacagcggat

SEQ ID NO: 7045 - DNA, 20 bp, Artificial
  Synthetically generated peptide
cgccaaccccacagcggatg

SEQ ID NO: 7046 - DNA, 20 bp, Artificial
  Synthetically generated peptide
gccaaccccacagcggatgc

SEQ ID NO: 7047 - DNA, 20 bp, Artificial
  Synthetically generated peptide
ccaaccccacagcggatgcc

SEQ ID NO: 7048 - DNA, 20 bp, Artificial
  Synthetically generated peptide
caaccccacagcggatgcct

SEQ ID NO: 7049 - DNA, 20 bp, Artificial
  Synthetically generated peptide
aaccccacagcggatgccta

SEQ ID NO: 7050 - DNA, 20 bp, Artificial
  Synthetically generated peptide
accccacagcggatgcctaa

SEQ ID NO: 7051 - DNA, 20 bp, Artificial
  Synthetically generated peptide
ccccacagcggatgcctaaa

SEQ ID NO: 7052 - DNA, 20 bp, Artificial
  Synthetically generated peptide
cccacagcggatgcctaaag

SEQ ID NO: 7053 - DNA, 20 bp, Artificial
  Synthetically generated peptide
ccacagcggatgcctaaagc

SEQ ID NO: 7054 - DNA, 20 bp, Artificial
  Synthetically generated peptide
cacagcggatgcctaaagct

SEQ ID NO: 7055 - DNA, 20 bp, Artificial
  Synthetically generated peptide
acagcggatgcctaaagctg

SEQ ID NO: 7056 - DNA, 20 bp, Artificial
  Synthetically generated peptide
cagcggatgcctaaagctgc

SEQ ID NO: 7057 - DNA, 20 bp, Artificial
  Synthetically generated peptide
agcggatgcctaaagctgca

SEQ ID NO: 7058 - DNA, 20 bp, Artificial
  Synthetically generated peptide
gcggatgcctaaagctgcag

SEQ ID NO: 7059 - DNA, 20 bp, Artificial
  Synthetically generated peptide
cggatgcctaaagctgcaga

SEQ ID NO: 7060 - DNA, 20 bp, Artificial
  Synthetically generated peptide
agaccgccccccgccaaccc

SEQ ID NO: 7061 - DNA, 20 bp, Artificial
  Synthetically generated peptide
aagaccgccccccgccaacc

SEQ ID NO: 7062 - DNA, 20 bp, Artificial
  Synthetically generated peptide
caagaccgccccccgccaac

SEQ ID NO: 7063 - DNA, 20 bp, Artificial
  Synthetically generated peptide
ccaagaccgccccccgccaa

SEQ ID NO: 7064 - DNA, 20 bp, Artificial
  Synthetically generated peptide
cccaagaccgccccccgcca

SEQ ID NO: 7065 - DNA, 20 bp, Artificial
  Synthetically generated peptide
tcccaagaccgccccccgcc

SEQ ID NO: 7066 - DNA, 20 bp, Artificial
  Synthetically generated peptide
ctcccaagaccgccccccgc

SEQ ID NO: 7067 - DNA, 20 bp, Artificial
  Synthetically generated peptide
tctcccaagaccgccccccg

SEQ ID NO: 7068 - DNA, 20 bp, Artificial
  Synthetically generated peptide
atctcccaagaccgcccccc

SEQ ID NO: 7069 - DNA, 20 bp, Artificial
  Synthetically generated peptide
tatctcccaagaccgccccc

SEQ ID NO: 7070 - DNA, 20 bp, Artificial
  Synthetically generated peptide
ttatctcccaagaccgcccc

SEQ ID NO: 7071 - DNA, 20 bp, Artificial
  Synthetically generated peptide
cttatctcccaagaccgccc

SEQ ID NO: 7072 - DNA, 20 bp, Artificial
  Synthetically generated peptide
acttatctcccaagaccgcc

SEQ ID NO: 7073 - DNA, 20 bp, Artificial
  Synthetically generated peptide
cacttatctcccaagaccgc

SEQ ID NO: 7074 - DNA, 20 bp, Artificial
  Synthetically generated peptide
ccacttatctcccaagaccg

SEQ ID NO: 7075 - DNA, 27 bp, Artificial
  Synthetically generated peptide
cgcctcccgtccctaccgtcagtcggt

SEQ ID NO: 7076 - DNA, 20 bp, Artificial
  Synthetically generated peptide
gcctcccgtccctaccgtca

SEQ ID NO: 7077 - DNA, 20 bp, Artificial
  Synthetically generated peptide
cctcccgtccctaccgtcag

SEQ ID NO: 7078 - DNA, 20 bp, Artificial
  Synthetically generated peptide
ctcccgtccctaccgtcagt

SEQ ID NO: 7079 - DNA, 20 bp, Artificial
  Synthetically generated peptide
tcccgtccctaccgtcagtc

SEQ ID NO: 7080 - DNA, 20 bp, Artificial
  Synthetically generated peptide
cccgtccctaccgtcagtcg

SEQ ID NO: 7081 - DNA, 20 bp, Artificial
  Synthetically generated peptide
ccgtccctaccgtcagtcgg

SEQ ID NO: 7082 - DNA, 20 bp, Artificial
  Synthetically generated peptide
cgtccctaccgtcagtcggt

SEQ ID NO: 7083 - DNA, 20 bp, Artificial
  Synthetically generated peptide
gtccctaccgtcagtcggtc

SEQ ID NO: 7084 - DNA, 20 bp, Artificial
  Synthetically generated peptide
tccctaccgtcagtcggtcc

SEQ ID NO: 7085 - DNA, 20 bp, Artificial
  Synthetically generated peptide
ccctaccgtcagtcggtccg

SEQ ID NO: 7086 - DNA, 20 bp, Artificial
  Synthetically generated peptide
cctaccgtcagtcggtccgt

SEQ ID NO: 7087 - DNA, 20 bp, Artificial
  Synthetically generated peptide
ctaccgtcagtcggtccgtc

SEQ ID NO: 7088 - DNA, 20 bp, Artificial
  Synthetically generated peptide
taccgtcagtcggtccgtcc

SEQ ID NO: 7089 - DNA, 20 bp, Artificial
  Synthetically generated peptide
accgtcagtcggtccgtccg

SEQ ID NO: 7090 - DNA, 20 bp, Artificial
  Synthetically generated peptide
ccgtcagtcggtccgtccgc

SEQ ID NO: 7091 - DNA, 20 bp, Artificial
  Synthetically generated peptide
cgtcagtcggtccgtccgcc

SEQ ID NO: 7092 - DNA, 20 bp, Artificial
  Synthetically generated peptide
gtcagtcggtccgtccgccc

SEQ ID NO: 7093 - DNA, 20 bp, Artificial
  Synthetically generated peptide
tcagtcggtccgtccgccct

SEQ ID NO: 7094 - DNA, 20 bp, Artificial
  Synthetically generated peptide
cagtcggtccgtccgccctc

SEQ ID NO: 7095 - DNA, 20 bp, Artificial
  Synthetically generated peptide
agtcggtccgtccgccctcc

SEQ ID NO: 7096 - DNA, 20 bp, Artificial
  Synthetically generated peptide
gtcggtccgtccgccctccc

SEQ ID NO: 7097 - DNA, 20 bp, Artificial
  Synthetically generated peptide
tcggtccgtccgccctcccg

SEQ ID NO: 7098 - DNA, 20 bp, Artificial
  Synthetically generated peptide
cggtccgtccgccctcccgc

SEQ ID NO: 7099 - DNA, 20 bp, Artificial
  Synthetically generated peptide
ggtccgtccgccctcccgcc

SEQ ID NO: 7100 - DNA, 20 bp, Artificial
  Synthetically generated peptide
gtccgtccgccctcccgccc

SEQ ID NO: 7101 - DNA, 20 bp, Artificial
  Synthetically generated peptide
tccgtccgccctcccgcccg

SEQ ID NO: 7102 - DNA, 20 bp, Artificial
  Synthetically generated peptide
ccgtccgccctcccgcccgc

SEQ ID NO: 7103 - DNA, 20 bp, Artificial
  Synthetically generated peptide
cgtccgccctcccgcccgcg

SEQ ID NO: 7104 - DNA, 20 bp, Artificial
  Synthetically generated peptide
gtccgccctcccgcccgcgg

SEQ ID NO: 7105 - DNA, 20 bp, Artificial
  Synthetically generated peptide
tccgccctcccgcccgcggc

SEQ ID NO: 7106 - DNA, 20 bp, Artificial
  Synthetically generated peptide
ccgccctcccgcccgcggct

SEQ ID NO: 7107 - DNA, 20 bp, Artificial
  Synthetically generated peptide
cgccctcccgcccgcggctc

SEQ ID NO: 7108 - DNA, 20 bp, Artificial
  Synthetically generated peptide
gccctcccgcccgcggctcc

SEQ ID NO: 7109 - DNA, 20 bp, Artificial
  Synthetically generated peptide
ccctcccgcccgcggctccg

SEQ ID NO: 7110 - DNA, 20 bp, Artificial
  Synthetically generated peptide
cctcccgcccgcggctccgc

SEQ ID NO: 7111 - DNA, 20 bp, Artificial
  Synthetically generated peptide
ctcccgcccgcggctccgct

SEQ ID NO: 7112 - DNA, 20 bp, Artificial
  Synthetically generated peptide
tcccgcccgcggctccgctc

SEQ ID NO: 7113 - DNA, 20 bp, Artificial
  Synthetically generated peptide
cccgcccgcggctccgctca

SEQ ID NO: 7114 - DNA, 20 bp, Artificial
  Synthetically generated peptide
ccgcccgcggctccgctcag

SEQ ID NO: 7115 - DNA, 20 bp, Artificial
  Synthetically generated peptide
cgcccgcggctccgctcagc

SEQ ID NO: 7116 - DNA, 20 bp, Artificial
  Synthetically generated peptide
gcccgcggctccgctcagcg

SEQ ID NO: 7117 - DNA, 20 bp, Artificial
  Synthetically generated peptide
cccgcggctccgctcagcgt

SEQ ID NO: 7118 - DNA, 20 bp, Artificial
  Synthetically generated peptide
ccgcggctccgctcagcgtc

SEQ ID NO: 7119 - DNA, 20 bp, Artificial
  Synthetically generated peptide
cgcggctccgctcagcgtcc

SEQ ID NO: 7120 - DNA, 20 bp, Artificial
  Synthetically generated peptide
gcggctccgctcagcgtccg

SEQ ID NO: 7121 - DNA, 20 bp, Artificial
  Synthetically generated peptide
cggctccgctcagcgtccga

SEQ ID NO: 7122 - DNA, 20 bp, Artificial
  Synthetically generated peptide
ggctccgctcagcgtccgac

SEQ ID NO: 7123 - DNA, 20 bp, Artificial
  Synthetically generated peptide
gctccgctcagcgtccgacc

SEQ ID NO: 7124 - DNA, 20 bp, Artificial
  Synthetically generated peptide
ctccgctcagcgtccgaccc

SEQ ID NO: 7125 - DNA, 20 bp, Artificial
  Synthetically generated peptide
tccgctcagcgtccgaccca

SEQ ID NO: 7126 - DNA, 20 bp, Artificial
  Synthetically generated peptide
ccgctcagcgtccgacccag

SEQ ID NO: 7127 - DNA, 20 bp, Artificial
  Synthetically generated peptide
cgctcagcgtccgacccagg

SEQ ID NO: 7128 - DNA, 20 bp, Artificial
  Synthetically generated peptide
gctcagcgtccgacccaggg

SEQ ID NO: 7129 - DNA, 20 bp, Artificial
  Synthetically generated peptide
ctcagcgtccgacccagggg

SEQ ID NO: 7130 - DNA, 20 bp, Artificial
  Synthetically generated peptide
tcagcgtccgacccaggggg

SEQ ID NO: 7131 - DNA, 20 bp, Artificial
  Synthetically generated peptide
cagcgtccgacccagggggg

SEQ ID NO: 7132 - DNA, 20 bp, Artificial
  Synthetically generated peptide
agcgtccgacccagggggga

SEQ ID NO: 7133 - DNA, 20 bp, Artificial
  Synthetically generated peptide
gcgtccgacccaggggggag

SEQ ID NO: 7134 - DNA, 20 bp, Artificial
  Synthetically generated peptide
cgtccgacccaggggggagg

SEQ ID NO: 7135 - DNA, 20 bp, Artificial
  Synthetically generated peptide
tcgcctcccgtccctaccgt

SEQ ID NO: 7136 - DNA, 20 bp, Artificial
  Synthetically generated peptide
ctcgcctcccgtccctaccg

SEQ ID NO: 7137 - DNA, 20 bp, Artificial
  Synthetically generated peptide
gctcgcctcccgtccctacc

SEQ ID NO: 7138 - DNA, 20 bp, Artificial
  Synthetically generated peptide
tgctcgcctcccgtccctac

SEQ ID NO: 7139 - DNA, 20 bp, Artificial
  Synthetically generated peptide
ttgctcgcctcccgtcccta

SEQ ID NO: 7140 - DNA, 20 bp, Artificial
  Synthetically generated peptide
cttgctcgcctcccgtccct

SEQ ID NO: 7141 - DNA, 26 bp, Artificial
  Synthetically generated peptide
cggtccgtccgccctcccgcccgcgg

SEQ ID NO: 7142 - DNA, 20 bp, Artificial
  Synthetically generated peptide
ggtccgtccgccctcccgcc

SEQ ID NO: 7143 - DNA, 20 bp, Artificial
  Synthetically generated peptide
gtccgtccgccctcccgccc

SEQ ID NO: 7144 - DNA, 20 bp, Artificial
  Synthetically generated peptide
tccgtccgccctcccgcccg

SEQ ID NO: 7145 - DNA, 20 bp, Artificial
  Synthetically generated peptide
ccgtccgccctcccgcccgc

SEQ ID NO: 7146 - DNA, 20 bp, Artificial
  Synthetically generated peptide
cgtccgccctcccgcccgcg

SEQ ID NO: 7147 - DNA, 20 bp, Artificial
  Synthetically generated peptide
gtccgccctcccgcccgcgg

SEQ ID NO: 7148 - DNA, 20 bp, Artificial
  Synthetically generated peptide
tccgccctcccgcccgcggc

SEQ ID NO: 7149 - DNA, 20 bp, Artificial
  Synthetically generated peptide
ccgccctcccgcccgcggct

SEQ ID NO: 7150 - DNA, 20 bp, Artificial
  Synthetically generated peptide
cgccctcccgcccgcggctc

SEQ ID NO: 7151 - DNA, 20 bp, Artificial
  Synthetically generated peptide
gccctcccgcccgcggctcc

SEQ ID NO: 7152 - DNA, 20 bp, Artificial
  Synthetically generated peptide
ccctcccgcccgcggctccg

SEQ ID NO: 7153 - DNA, 20 bp, Artificial
  Synthetically generated peptide
cctcccgcccgcggctccgc

SEQ ID NO: 7154 - DNA, 20 bp, Artificial
  Synthetically generated peptide
ctcccgcccgcggctccgct

SEQ ID NO: 7155 - DNA, 20 bp, Artificial
  Synthetically generated peptide
tcccgcccgcggctccgctc

SEQ ID NO: 7156 - DNA, 20 bp, Artificial
  Synthetically generated peptide
cccgcccgcggctccgctca

SEQ ID NO: 7157 - DNA, 20 bp, Artificial
  Synthetically generated peptide
ccgcccgcggctccgctcag

SEQ ID NO: 7158 - DNA, 20 bp, Artificial
  Synthetically generated peptide
cgcccgcggctccgctcagc

SEQ ID NO: 7159 - DNA, 20 bp, Artificial
  Synthetically generated peptide
gcccgcggctccgctcagcg

SEQ ID NO: 7160 - DNA, 20 bp, Artificial
  Synthetically generated peptide
cccgcggctccgctcagcgt

SEQ ID NO: 7161 - DNA, 20 bp, Artificial
  Synthetically generated peptide
ccgcggctccgctcagcgtc

SEQ ID NO: 7162 - DNA, 20 bp, Artificial
  Synthetically generated peptide
cgcggctccgctcagcgtcc

SEQ ID NO: 7163 - DNA, 20 bp, Artificial
  Synthetically generated peptide
gcggctccgctcagcgtccg

SEQ ID NO: 7164 - DNA, 20 bp, Artificial
  Synthetically generated peptide
cggctccgctcagcgtccga

SEQ ID NO: 7165 - DNA, 20 bp, Artificial
  Synthetically generated peptide
ggctccgctcagcgtccgac

SEQ ID NO: 7166 - DNA, 20 bp, Artificial
  Synthetically generated peptide
gctccgctcagcgtccgacc

SEQ ID NO: 7167 - DNA, 20 bp, Artificial
  Synthetically generated peptide
ctccgctcagcgtccgaccc

SEQ ID NO: 7168 - DNA, 20 bp, Artificial
  Synthetically generated peptide
tccgctcagcgtccgaccca

SEQ ID NO: 7169 - DNA, 20 bp, Artificial
  Synthetically generated peptide
ccgctcagcgtccgacccag

SEQ ID NO: 7170 - DNA, 20 bp, Artificial
  Synthetically generated peptide
cgctcagcgtccgacccagg

SEQ ID NO: 7171 - DNA, 20 bp, Artificial
  Synthetically generated peptide
gctcagcgtccgacccaggg

SEQ ID NO: 7172 - DNA, 20 bp, Artificial
  Synthetically generated peptide
ctcagcgtccgacccagggg

SEQ ID NO: 7173 - DNA, 20 bp, Artificial
  Synthetically generated peptide
tcagcgtccgacccaggggg

SEQ ID NO: 7174 - DNA, 20 bp, Artificial
  Synthetically generated peptide
cagcgtccgacccagggggg

SEQ ID NO: 7175 - DNA, 20 bp, Artificial
  Synthetically generated peptide
agcgtccgacccagggggga

SEQ ID NO: 7176 - DNA, 20 bp, Artificial
  Synthetically generated peptide
gcgtccgacccaggggggag

SEQ ID NO: 7177 - DNA, 20 bp, Artificial
  Synthetically generated peptide
cgtccgacccaggggggagg

SEQ ID NO: 7178 - DNA, 20 bp, Artificial
  Synthetically generated peptide
tcggtccgtccgccctcccg

SEQ ID NO: 7179 - DNA, 20 bp, Artificial
  Synthetically generated peptide
gtcggtccgtccgccctccc

SEQ ID NO: 7180 - DNA, 20 bp, Artificial
  Synthetically generated peptide
agtcggtccgtccgccctcc

SEQ ID NO: 7181 - DNA, 20 bp, Artificial
  Synthetically generated peptide
cagtcggtccgtccgccctc

SEQ ID NO: 7182 - DNA, 20 bp, Artificial
  Synthetically generated peptide
tcagtcggtccgtccgccct

SEQ ID NO: 7183 - DNA, 20 bp, Artificial
  Synthetically generated peptide
gtcagtcggtccgtccgccc

SEQ ID NO: 7184 - DNA, 20 bp, Artificial
  Synthetically generated peptide
cgtcagtcggtccgtccgcc

SEQ ID NO: 7185 - DNA, 20 bp, Artificial
  Synthetically generated peptide
ccgtcagtcggtccgtccgc

SEQ ID NO: 7186 - DNA, 20 bp, Artificial
  Synthetically generated peptide
accgtcagtcggtccgtccg

SEQ ID NO: 7187 - DNA, 20 bp, Artificial
  Synthetically generated peptide
taccgtcagtcggtccgtcc

SEQ ID NO: 7188 - DNA, 20 bp, Artificial
  Synthetically generated peptide
ctaccgtcagtcggtccgtc

SEQ ID NO: 7189 - DNA, 20 bp, Artificial
  Synthetically generated peptide
cctaccgtcagtcggtccgt

SEQ ID NO: 7190 - DNA, 20 bp, Artificial
  Synthetically generated peptide
ccctaccgtcagtcggtccg

SEQ ID NO: 7191 - DNA, 20 bp, Artificial
  Synthetically generated peptide
tccctaccgtcagtcggtcc

SEQ ID NO: 7192 - DNA, 20 bp, Artificial
  Synthetically generated peptide
gtccctaccgtcagtcggtc

SEQ ID NO: 7193 - DNA, 20 bp, Artificial
  Synthetically generated peptide
cgtccctaccgtcagtcggt

SEQ ID NO: 7194 - DNA, 20 bp, Artificial
  Synthetically generated peptide
ccgtccctaccgtcagtcgg

SEQ ID NO: 7195 - DNA, 20 bp, Artificial
  Synthetically generated peptide
cccgtccctaccgtcagtcg

SEQ ID NO: 7196 - DNA, 20 bp, Artificial
  Synthetically generated peptide
tcccgtccctaccgtcagtc

SEQ ID NO: 7197 - DNA, 20 bp, Artificial
  Synthetically generated peptide
ctcccgtccctaccgtcagt

SEQ ID NO: 7198 - DNA, 20 bp, Artificial
  Synthetically generated peptide
cctcccgtccctaccgtcag

SEQ ID NO: 7199 - DNA, 20 bp, Artificial
  Synthetically generated peptide
gcctcccgtccctaccgtca

SEQ ID NO: 7200 - DNA, 20 bp, Artificial
  Synthetically generated peptide
cgcctcccgtccctaccgtc

SEQ ID NO: 7201 - DNA, 20 bp, Artificial
  Synthetically generated peptide
tcgcctcccgtccctaccgt

SEQ ID NO: 7202 - DNA, 20 bp, Artificial
  Synthetically generated peptide
ctcgcctcccgtccctaccg

SEQ ID NO: 7203 - DNA, 20 bp, Artificial
  Synthetically generated peptide
gctcgcctcccgtccctacc

SEQ ID NO: 7204 - DNA, 20 bp, Artificial
  Synthetically generated peptide
tgctcgcctcccgtccctac

SEQ ID NO: 7205 - DNA, 20 bp, Artificial
  Synthetically generated peptide
ttgctcgcctcccgtcccta

SEQ ID NO: 7206 - DNA, 20 bp, Artificial
  Synthetically generated peptide
cttgctcgcctcccgtccct

SEQ ID NO: 7207 - DNA, 29 bp, Artificial
  Synthetically generated peptide
cgccaacttgtggtcctacagtcaacaag

SEQ ID NO: 7208 - DNA, 20 bp, Artificial
  Synthetically generated peptide
ccgccaacttgtggtcctac

SEQ ID NO: 7209 - DNA, 20 bp, Artificial
  Synthetically generated peptide
gccgccaacttgtggtccta

SEQ ID NO: 7210 - DNA, 20 bp, Artificial
  Synthetically generated peptide
agccgccaacttgtggtcct

SEQ ID NO: 7211 - DNA, 20 bp, Artificial
  Synthetically generated peptide
tagccgccaacttgtggtcc

SEQ ID NO: 7212 - DNA, 20 bp, Artificial
  Synthetically generated peptide
ttagccgccaacttgtggtc

SEQ ID NO: 7213 - DNA, 20 bp, Artificial
  Synthetically generated peptide
gttagccgccaacttgtggt

SEQ ID NO: 7214 - DNA, 20 bp, Artificial
  Synthetically generated peptide
agttagccgccaacttgtgg

SEQ ID NO: 7215 - DNA, 20 bp, Artificial
  Synthetically generated peptide
aagttagccgccaacttgtg

SEQ ID NO: 7216 - DNA, 20 bp, Artificial
  Synthetically generated peptide
taagttagccgccaacttgt

SEQ ID NO: 7217 - DNA, 20 bp, Artificial
  Synthetically generated peptide
ctaagttagccgccaacttg

SEQ ID NO: 7218 - DNA, 20 bp, Artificial
  Synthetically generated peptide
tctaagttagccgccaactt

SEQ ID NO: 7219 - DNA, 20 bp, Artificial
  Synthetically generated peptide
ctctaagttagccgccaact

SEQ ID NO: 7220 - DNA, 20 bp, Artificial
  Synthetically generated peptide
gctctaagttagccgccaac

SEQ ID NO: 7221 - DNA, 20 bp, Artificial
  Synthetically generated peptide
tgctctaagttagccgccaa

SEQ ID NO: 7222 - DNA, 20 bp, Artificial
  Synthetically generated peptide
ttgctctaagttagccgcca

SEQ ID NO: 7223 - DNA, 20 bp, Artificial
  Synthetically generated peptide
attgctctaagttagccgcc

SEQ ID NO: 7224 - DNA, 20 bp, Artificial
  Synthetically generated peptide
cattgctctaagttagccgc

SEQ ID NO: 7225 - DNA, 20 bp, Artificial
  Synthetically generated peptide
acattgctctaagttagccg

SEQ ID NO: 7226 - DNA, 24 bp, Artificial
  Synthetically generated peptide
cgcagacacgggcccggaactcgg

SEQ ID NO: 7227 - DNA, 20 bp, Artificial
  Synthetically generated peptide
gcagacacgggcccggaact

SEQ ID NO: 7228 - DNA, 20 bp, Artificial
  Synthetically generated peptide
cagacacgggcccggaactc

SEQ ID NO: 7229 - DNA, 20 bp, Artificial
  Synthetically generated peptide
agacacgggcccggaactcg

SEQ ID NO: 7230 - DNA, 20 bp, Artificial
  Synthetically generated peptide
gacacgggcccggaactcgg

SEQ ID NO: 7231 - DNA, 20 bp, Artificial
  Synthetically generated peptide
acacgggcccggaactcggc

SEQ ID NO: 7232 - DNA, 20 bp, Artificial
  Synthetically generated peptide
cacgggcccggaactcggca

SEQ ID NO: 7233 - DNA, 20 bp, Artificial
  Synthetically generated peptide
acgggcccggaactcggcag

SEQ ID NO: 7234 - DNA, 20 bp, Artificial
  Synthetically generated peptide
cgggcccggaactcggcagg

SEQ ID NO: 7235 - DNA, 20 bp, Artificial
  Synthetically generated peptide
gggcccggaactcggcaggg

SEQ ID NO: 7236 - DNA, 20 bp, Artificial
  Synthetically generated peptide
ggcccggaactcggcagggg

SEQ ID NO: 7237 - DNA, 20 bp, Artificial
  Synthetically generated peptide
gcccggaactcggcaggggg

SEQ ID NO: 7238 - DNA, 20 bp, Artificial
  Synthetically generated peptide
cccggaactcggcagggggc

SEQ ID NO: 7239 - DNA, 20 bp, Artificial
  Synthetically generated peptide
ccggaactcggcagggggca

SEQ ID NO: 7240 - DNA, 20 bp, Artificial
  Synthetically generated peptide
gcgcagacacgggcccggaa

SEQ ID NO: 7241 - DNA, 20 bp, Artificial
  Synthetically generated peptide
tgcgcagacacgggcccgga

SEQ ID NO: 7242 - DNA, 20 bp, Artificial
  Synthetically generated peptide
ttgcgcagacacgggcccgg

SEQ ID NO: 7243 - DNA, 20 bp, Artificial
  Synthetically generated peptide
cttgcgcagacacgggcccg

SEQ ID NO: 7244 - DNA, 20 bp, Artificial
  Synthetically generated peptide
gcttgcgcagacacgggccc

SEQ ID NO: 7245 - DNA, 20 bp, Artificial
  Synthetically generated peptide
agcttgcgcagacacgggcc

SEQ ID NO: 7246 - DNA, 20 bp, Artificial
  Synthetically generated peptide
cagcttgcgcagacacgggc

SEQ ID NO: 7247 - DNA, 20 bp, Artificial
  Synthetically generated peptide
tcagcttgcgcagacacggg

SEQ ID NO: 7248 - DNA, 20 bp, Artificial
  Synthetically generated peptide
atcagcttgcgcagacacgg

SEQ ID NO: 7249 - DNA, 20 bp, Artificial
  Synthetically generated peptide
aatcagcttgcgcagacacg

SEQ ID NO: 7250 - DNA, 20 bp, Artificial
  Synthetically generated peptide
caatcagcttgcgcagacac

SEQ ID NO: 7251 - DNA, 20 bp, Artificial
  Synthetically generated peptide
ccaatcagcttgcgcagaca

SEQ ID NO: 7252 - DNA, 20 bp, Artificial
  Synthetically generated peptide
gccaatcagcttgcgcagac

SEQ ID NO: 7253 - DNA, 20 bp, Artificial
  Synthetically generated peptide
agccaatcagcttgcgcaga

SEQ ID NO: 7254 - DNA, 20 bp, Artificial
  Synthetically generated peptide
cagccaatcagcttgcgcag

SEQ ID NO: 7255 - DNA, 20 bp, Artificial
  Synthetically generated peptide
ccagccaatcagcttgcgca

SEQ ID NO: 7256 - DNA, 20 bp, Artificial
  Synthetically generated peptide
tccagccaatcagcttgcgc

SEQ ID NO: 7257 - DNA, 20 bp, Artificial
  Synthetically generated peptide
ctccagccaatcagcttgcg

SEQ ID NO: 7258 - DNA, 27 bp, Artificial
  Synthetically generated peptide
cgcccggcctaggagggcaggtttctc

SEQ ID NO: 7259 - DNA, 20 bp, Artificial
  Synthetically generated peptide
gcccggcctaggagggcagg

SEQ ID NO: 7260 - DNA, 20 bp, Artificial
  Synthetically generated peptide
cccggcctaggagggcaggt

SEQ ID NO: 7261 - DNA, 20 bp, Artificial
  Synthetically generated peptide
ccggcctaggagggcaggtt

SEQ ID NO: 7262 - DNA, 20 bp, Artificial
  Synthetically generated peptide
cggcctaggagggcaggttt

SEQ ID NO: 7263 - DNA, 20 bp, Artificial
  Synthetically generated peptide
gcgcccggcctaggagggca

SEQ ID NO: 7264 - DNA, 20 bp, Artificial
  Synthetically generated peptide
agcgcccggcctaggagggc

SEQ ID NO: 7265 - DNA, 20 bp, Artificial
  Synthetically generated peptide
cagcgcccggcctaggaggg

SEQ ID NO: 7266 - DNA, 20 bp, Artificial
  Synthetically generated peptide
acagcgcccggcctaggagg

SEQ ID NO: 7267 - DNA, 20 bp, Artificial
  Synthetically generated peptide
cacagcgcccggcctaggag

SEQ ID NO: 7268 - DNA, 20 bp, Artificial
  Synthetically generated peptide
ccacagcgcccggcctagga

SEQ ID NO: 7269 - DNA, 20 bp, Artificial
  Synthetically generated peptide
gccacagcgcccggcctagg

SEQ ID NO: 7270 - DNA, 20 bp, Artificial
  Synthetically generated peptide
agccacagcgcccggcctag

SEQ ID NO: 7271 - DNA, 20 bp, Artificial
  Synthetically generated peptide
gagccacagcgcccggccta

SEQ ID NO: 7272 - DNA, 20 bp, Artificial
  Synthetically generated peptide
tgagccacagcgcccggcct

SEQ ID NO: 7273 - DNA, 20 bp, Artificial
  Synthetically generated peptide
gtgagccacagcgcccggcc

SEQ ID NO: 7274 - DNA, 20 bp, Artificial
  Synthetically generated peptide
cgtgagccacagcgcccggc

SEQ ID NO: 7275 - DNA, 20 bp, Artificial
  Synthetically generated peptide
gcgtgagccacagcgcccgg

SEQ ID NO: 7276 - DNA, 20 bp, Artificial
  Synthetically generated peptide
ggcgtgagccacagcgcccg

SEQ ID NO: 7277 - DNA, 20 bp, Artificial
  Synthetically generated peptide
gggcgtgagccacagcgccc

SEQ ID NO: 7278 - DNA, 20 bp, Artificial
  Synthetically generated peptide
cgggcgtgagccacagcgcc

SEQ ID NO: 7279 - DNA, 20 bp, Artificial
  Synthetically generated peptide
acgggcgtgagccacagcgc

SEQ ID NO: 7280 - DNA, 20 bp, Artificial
  Synthetically generated peptide
tacgggcgtgagccacagcg

SEQ ID NO: 7281 - DNA, 20 bp, Artificial
  Synthetically generated peptide
ttacgggcgtgagccacagc

SEQ ID NO: 7282 - DNA, 20 bp, Artificial
  Synthetically generated peptide
attacgggcgtgagccacag

SEQ ID NO: 7283 - DNA, 20 bp, Artificial
  Synthetically generated peptide
gattacgggcgtgagccaca

SEQ ID NO: 7284 - DNA, 20 bp, Artificial
  Synthetically generated peptide
agattacgggcgtgagccac

SEQ ID NO: 7285 - DNA, 20 bp, Artificial
  Synthetically generated peptide
gagattacgggcgtgagcca

SEQ ID NO: 7286 - DNA, 20 bp, Artificial
  Synthetically generated peptide
tgagattacgggcgtgagcc

SEQ ID NO: 7287 - DNA, 20 bp, Artificial
  Synthetically generated peptide
ctgagattacgggcgtgagc

SEQ ID NO: 7288 - DNA, 20 bp, Artificial
  Synthetically generated peptide
gctgagattacgggcgtgag

SEQ ID NO: 7289 - DNA, 20 bp, Artificial
  Synthetically generated peptide
tgctgagattacgggcgtga

SEQ ID NO: 7290 - DNA, 20 bp, Artificial
  Synthetically generated peptide
atgctgagattacgggcgtg

SEQ ID NO: 7291 - DNA, 20 bp, Artificial
  Synthetically generated peptide
tatgctgagattacgggcgt

SEQ ID NO: 7292 - DNA, 20 bp, Artificial
  Synthetically generated peptide
atatgctgagattacgggcg

SEQ ID NO: 7293 - DNA, 20 bp, Artificial
  Synthetically generated peptide
aatatgctgagattacgggc

SEQ ID NO: 7294 - DNA, 20 bp, Artificial
  Synthetically generated peptide
caatatgctgagattacggg

SEQ ID NO: 7295 - DNA, 20 bp, Artificial
  Synthetically generated peptide
ccaatatgctgagattacgg

SEQ ID NO: 7296 - DNA, 20 bp, Artificial
  Synthetically generated peptide
cccaatatgctgagattacg

SEQ ID NO: 7297 - DNA, 25 bp, Artificial
  Synthetically generated peptide
tgccgccttctccactgctcaggcg

SEQ ID NO: 7298 - DNA, 20 bp, Artificial
  Synthetically generated peptide
gccgccttctccactgctca

SEQ ID NO: 7299 - DNA, 20 bp, Artificial
  Synthetically generated peptide
ccgccttctccactgctcag

SEQ ID NO: 7300 - DNA, 20 bp, Artificial
  Synthetically generated peptide
cgccttctccactgctcagg

SEQ ID NO: 7301 - DNA, 20 bp, Artificial
  Synthetically generated peptide
gtgccgccttctccactgct

SEQ ID NO: 7302 - DNA, 20 bp, Artificial
  Synthetically generated peptide
agtgccgccttctccactgc

SEQ ID NO: 7303 - DNA, 20 bp, Artificial
  Synthetically generated peptide
gagtgccgccttctccactg

SEQ ID NO: 7304 - DNA, 20 bp, Artificial
  Synthetically generated peptide
agagtgccgccttctccact

SEQ ID NO: 7305 - DNA, 20 bp, Artificial
  Synthetically generated peptide
cagagtgccgccttctccac

SEQ ID NO: 7306 - DNA, 20 bp, Artificial
  Synthetically generated peptide
ccagagtgccgccttctcca

SEQ ID NO: 7307 - DNA, 20 bp, Artificial
  Synthetically generated peptide
accagagtgccgccttctcc

SEQ ID NO: 7308 - DNA, 20 bp, Artificial
  Synthetically generated peptide
caccagagtgccgccttctc

SEQ ID NO: 7309 - DNA, 20 bp, Artificial
  Synthetically generated peptide
ccaccagagtgccgccttct

SEQ ID NO: 7310 - DNA, 20 bp, Artificial
  Synthetically generated peptide
cccaccagagtgccgccttc

SEQ ID NO: 7311 - DNA, 20 bp, Artificial
  Synthetically generated peptide
ccccaccagagtgccgcctt

SEQ ID NO: 7312 - DNA, 20 bp, Artificial
  Synthetically generated peptide
gccccaccagagtgccgcct

SEQ ID NO: 7313 - DNA, 20 bp, Artificial
  Synthetically generated peptide
agccccaccagagtgccgcc

SEQ ID NO: 7314 - DNA, 20 bp, Artificial
  Synthetically generated peptide
cagccccaccagagtgccgc

SEQ ID NO: 7315 - DNA, 20 bp, Artificial
  Synthetically generated peptide
gcagccccaccagagtgccg

SEQ ID NO: 7316 - DNA, 30 bp, Artificial
  Synthetically generated peptide
accgcctgacagctggcgcggctgcctggc

SEQ ID NO: 7317 - DNA, 20 bp, Artificial
  Synthetically generated peptide
ccgcctgacagctggcgcgg

SEQ ID NO: 7318 - DNA, 20 bp, Artificial
  Synthetically generated peptide
cgcctgacagctggcgcggc

SEQ ID NO: 7319 - DNA, 20 bp, Artificial
  Synthetically generated peptide
gcctgacagctggcgcggct

SEQ ID NO: 7320 - DNA, 20 bp, Artificial
  Synthetically generated peptide
cctgacagctggcgcggctg

SEQ ID NO: 7321 - DNA, 20 bp, Artificial
  Synthetically generated peptide
ctgacagctggcgcggctgc

SEQ ID NO: 7322 - DNA, 20 bp, Artificial
  Synthetically generated peptide
tgacagctggcgcggctgcc

SEQ ID NO: 7323 - DNA, 20 bp, Artificial
  Synthetically generated peptide
gacagctggcgcggctgcct

SEQ ID NO: 7324 - DNA, 20 bp, Artificial
  Synthetically generated peptide
acagctggcgcggctgcctg

SEQ ID NO: 7325 - DNA, 20 bp, Artificial
  Synthetically generated peptide
cagctggcgcggctgcctgg

SEQ ID NO: 7326 - DNA, 20 bp, Artificial
  Synthetically generated peptide
agctggcgcggctgcctggc

SEQ ID NO: 7327 - DNA, 20 bp, Artificial
  Synthetically generated peptide
gctggcgcggctgcctggct

SEQ ID NO: 7328 - DNA, 20 bp, Artificial
  Synthetically generated peptide
ctggcgcggctgcctggctc

SEQ ID NO: 7329 - DNA, 20 bp, Artificial
  Synthetically generated peptide
tggcgcggctgcctggctcc

SEQ ID NO: 7330 - DNA, 20 bp, Artificial
  Synthetically generated peptide
ggcgcggctgcctggctccg

SEQ ID NO: 7331 - DNA, 20 bp, Artificial
  Synthetically generated peptide
gcgcggctgcctggctccga

SEQ ID NO: 7332 - DNA, 20 bp, Artificial
  Synthetically generated peptide
cgcggctgcctggctccgag

SEQ ID NO: 7333 - DNA, 20 bp, Artificial
  Synthetically generated peptide
gcggctgcctggctccgaga

SEQ ID NO: 7334 - DNA, 20 bp, Artificial
  Synthetically generated peptide
cggctgcctggctccgagag

SEQ ID NO: 7335 - DNA, 20 bp, Artificial
  Synthetically generated peptide
ggctgcctggctccgagaga

SEQ ID NO: 7336 - DNA, 20 bp, Artificial
  Synthetically generated peptide
gctgcctggctccgagagac

SEQ ID NO: 7337 - DNA, 20 bp, Artificial
  Synthetically generated peptide
ctgcctggctccgagagaca

SEQ ID NO: 7338 - DNA, 20 bp, Artificial
  Synthetically generated peptide
tgcctggctccgagagacac

SEQ ID NO: 7339 - DNA, 20 bp, Artificial
  Synthetically generated peptide
gcctggctccgagagacact

SEQ ID NO: 7340 - DNA, 20 bp, Artificial
  Synthetically generated peptide
cctggctccgagagacactc

SEQ ID NO: 7341 - DNA, 20 bp, Artificial
  Synthetically generated peptide
ctggctccgagagacactcg

SEQ ID NO: 7342 - DNA, 20 bp, Artificial
  Synthetically generated peptide
tggctccgagagacactcgg

SEQ ID NO: 7343 - DNA, 20 bp, Artificial
  Synthetically generated peptide
ggctccgagagacactcggc

SEQ ID NO: 7344 - DNA, 20 bp, Artificial
  Synthetically generated peptide
gctccgagagacactcggcc

SEQ ID NO: 7345 - DNA, 20 bp, Artificial
  Synthetically generated peptide
ctccgagagacactcggccc

SEQ ID NO: 7346 - DNA, 20 bp, Artificial
  Synthetically generated peptide
tccgagagacactcggcccg

SEQ ID NO: 7347 - DNA, 20 bp, Artificial
  Synthetically generated peptide
ccgagagacactcggcccgg

SEQ ID NO: 7348 - DNA, 20 bp, Artificial
  Synthetically generated peptide
cgagagacactcggcccggc

SEQ ID NO: 7349 - DNA, 20 bp, Artificial
  Synthetically generated peptide
gagagacactcggcccggct

SEQ ID NO: 7350 - DNA, 20 bp, Artificial
  Synthetically generated peptide
agagacactcggcccggctc

SEQ ID NO: 7351 - DNA, 20 bp, Artificial
  Synthetically generated peptide
gagacactcggcccggctct

SEQ ID NO: 7352 - DNA, 20 bp, Artificial
  Synthetically generated peptide
agacactcggcccggctctg

SEQ ID NO: 7353 - DNA, 20 bp, Artificial
  Synthetically generated peptide
gacactcggcccggctctga

SEQ ID NO: 7354 - DNA, 20 bp, Artificial
  Synthetically generated peptide
acactcggcccggctctgaa

SEQ ID NO: 7355 - DNA, 20 bp, Artificial
  Synthetically generated peptide
cactcggcccggctctgaag

SEQ ID NO: 7356 - DNA, 20 bp, Artificial
  Synthetically generated peptide
actcggcccggctctgaagg

SEQ ID NO: 7357 - DNA, 20 bp, Artificial
  Synthetically generated peptide
ctcggcccggctctgaaggg

SEQ ID NO: 7358 - DNA, 20 bp, Artificial
  Synthetically generated peptide
tcggcccggctctgaaggga

SEQ ID NO: 7359 - DNA, 20 bp, Artificial
  Synthetically generated peptide
cggcccggctctgaagggaa

SEQ ID NO: 7360 - DNA, 20 bp, Artificial
  Synthetically generated peptide
ggcccggctctgaagggaaa

SEQ ID NO: 7361 - DNA, 20 bp, Artificial
  Synthetically generated peptide
gcccggctctgaagggaaaa

SEQ ID NO: 7362 - DNA, 20 bp, Artificial
  Synthetically generated peptide
cccggctctgaagggaaaac

SEQ ID NO: 7363 - DNA, 20 bp, Artificial
  Synthetically generated peptide
ccggctctgaagggaaaaca

SEQ ID NO: 7364 - DNA, 20 bp, Artificial
  Synthetically generated peptide
cggctctgaagggaaaacat

SEQ ID NO: 7365 - DNA, 20 bp, Artificial
  Synthetically generated peptide
aaccgcctgacagctggcgc

SEQ ID NO: 7366 - DNA, 20 bp, Artificial
  Synthetically generated peptide
aaaccgcctgacagctggcg

SEQ ID NO: 7367 - DNA, 20 bp, Artificial
  Synthetically generated peptide
gaaaccgcctgacagctggc

SEQ ID NO: 7368 - DNA, 20 bp, Artificial
  Synthetically generated peptide
agaaaccgcctgacagctgg

SEQ ID NO: 7369 - DNA, 20 bp, Artificial
  Synthetically generated peptide
tagaaaccgcctgacagctg

SEQ ID NO: 7370 - DNA, 20 bp, Artificial
  Synthetically generated peptide
ctagaaaccgcctgacagct

SEQ ID NO: 7371 - DNA, 20 bp, Artificial
  Synthetically generated peptide
gctagaaaccgcctgacagc

SEQ ID NO: 7372 - DNA, 20 bp, Artificial
  Synthetically generated peptide
ggctagaaaccgcctgacag

SEQ ID NO: 7373 - DNA, 20 bp, Artificial
  Synthetically generated peptide
aggctagaaaccgcctgaca

SEQ ID NO: 7374 - DNA, 20 bp, Artificial
  Synthetically generated peptide
gaggctagaaaccgcctgac

SEQ ID NO: 7375 - DNA, 20 bp, Artificial
  Synthetically generated peptide
cgaggctagaaaccgcctga

SEQ ID NO: 7376 - DNA, 20 bp, Artificial
  Synthetically generated peptide
gcgaggctagaaaccgcctg

SEQ ID NO: 7377 - DNA, 20 bp, Artificial
  Synthetically generated peptide
agcgaggctagaaaccgcct

SEQ ID NO: 7378 - DNA, 20 bp, Artificial
  Synthetically generated peptide
aagcgaggctagaaaccgcc

SEQ ID NO: 7379 - DNA, 21 bp, Artificial
  Synthetically generated peptide
ctgcgaggcgcggccacggcg

SEQ ID NO: 7380 - DNA, 20 bp, Artificial
  Synthetically generated peptide
tgcgaggcgcggccacggcg

SEQ ID NO: 7381 - DNA, 20 bp, Artificial
  Synthetically generated peptide
gcgaggcgcggccacggcga

SEQ ID NO: 7382 - DNA, 20 bp, Artificial
  Synthetically generated peptide
cgaggcgcggccacggcgag

SEQ ID NO: 7383 - DNA, 20 bp, Artificial
  Synthetically generated peptide
tctgcgaggcgcggccacgg

SEQ ID NO: 7384 - DNA, 20 bp, Artificial
  Synthetically generated peptide
gtctgcgaggcgcggccacg

SEQ ID NO: 7385 - DNA, 20 bp, Artificial
  Synthetically generated peptide
tgtctgcgaggcgcggccac

SEQ ID NO: 7386 - DNA, 20 bp, Artificial
  Synthetically generated peptide
atgtctgcgaggcgcggcca

SEQ ID NO: 7387 - DNA, 20 bp, Artificial
  Synthetically generated peptide
gatgtctgcgaggcgcggcc

SEQ ID NO: 7388 - DNA, 20 bp, Artificial
  Synthetically generated peptide
tgatgtctgcgaggcgcggc

SEQ ID NO: 7389 - DNA, 20 bp, Artificial
  Synthetically generated peptide
atgatgtctgcgaggcgcgg

SEQ ID NO: 7390 - DNA, 20 bp, Artificial
  Synthetically generated peptide
gatgatgtctgcgaggcgcg

SEQ ID NO: 7391 - DNA, 20 bp, Artificial
  Synthetically generated peptide
agatgatgtctgcgaggcgc

SEQ ID NO: 7392 - DNA, 20 bp, Artificial
  Synthetically generated peptide
aagatgatgtctgcgaggcg

SEQ ID NO: 7393 - DNA, 20 bp, Artificial
  Synthetically generated peptide
aaagatgatgtctgcgaggc

SEQ ID NO: 7394 - DNA, 20 bp, Artificial
  Synthetically generated peptide
caaagatgatgtctgcgagg

SEQ ID NO: 7395 - DNA, 20 bp, Artificial
  Synthetically generated peptide
tcaaagatgatgtctgcgag

SEQ ID NO: 7396 - DNA, 26 bp, Artificial
  Synthetically generated peptide
cgaggaggaaaggcaggcggagtccg

SEQ ID NO: 7397 - DNA, 32 bp, Artificial
  Synthetically generated peptide
cagcgaagctgcagaacgtccccatcaccacg

SEQ ID NO: 7398 - DNA, 20 bp, Artificial
  Synthetically generated peptide
agcgaagctgcagaacgtcc

SEQ ID NO: 7399 - DNA, 20 bp, Artificial
  Synthetically generated peptide
gcgaagctgcagaacgtccc

SEQ ID NO: 7400 - DNA, 20 bp, Artificial
  Synthetically generated peptide
cgaagctgcagaacgtcccc

SEQ ID NO: 7401 - DNA, 20 bp, Artificial
  Synthetically generated peptide
gaagctgcagaacgtcccca

SEQ ID NO: 7402 - DNA, 20 bp, Artificial
  Synthetically generated peptide
aagctgcagaacgtccccat

SEQ ID NO: 7403 - DNA, 20 bp, Artificial
  Synthetically generated peptide
agctgcagaacgtccccatc

SEQ ID NO: 7404 - DNA, 20 bp, Artificial
  Synthetically generated peptide
gctgcagaacgtccccatca

SEQ ID NO: 7405 - DNA, 20 bp, Artificial
  Synthetically generated peptide
ctgcagaacgtccccatcac

SEQ ID NO: 7406 - DNA, 20 bp, Artificial
  Synthetically generated peptide
tgcagaacgtccccatcacc

SEQ ID NO: 7407 - DNA, 20 bp, Artificial
  Synthetically generated peptide
gcagaacgtccccatcacca

SEQ ID NO: 7408 - DNA, 20 bp, Artificial
  Synthetically generated peptide
cagaacgtccccatcaccac

SEQ ID NO: 7409 - DNA, 20 bp, Artificial
  Synthetically generated peptide
agaacgtccccatcaccacg

SEQ ID NO: 7410 - DNA, 20 bp, Artificial
  Synthetically generated peptide
gaacgtccccatcaccacgg

SEQ ID NO: 7411 - DNA, 20 bp, Artificial
  Synthetically generated peptide
aacgtccccatcaccacggg

SEQ ID NO: 7412 - DNA, 20 bp, Artificial
  Synthetically generated peptide
acgtccccatcaccacgggg

SEQ ID NO: 7413 - DNA, 20 bp, Artificial
  Synthetically generated peptide
cgtccccatcaccacggggt

SEQ ID NO: 7414 - DNA, 20 bp, Artificial
  Synthetically generated peptide
gtccccatcaccacggggtc

SEQ ID NO: 7415 - DNA, 20 bp, Artificial
  Synthetically generated peptide
tccccatcaccacggggtcc

SEQ ID NO: 7416 - DNA, 20 bp, Artificial
  Synthetically generated peptide
ccccatcaccacggggtcct

SEQ ID NO: 7417 - DNA, 20 bp, Artificial
  Synthetically generated peptide
cccatcaccacggggtcctc

SEQ ID NO: 7418 - DNA, 20 bp, Artificial
  Synthetically generated peptide
ccatcaccacggggtcctcc

SEQ ID NO: 7419 - DNA, 20 bp, Artificial
  Synthetically generated peptide
catcaccacggggtcctccg

SEQ ID NO: 7420 - DNA, 20 bp, Artificial
  Synthetically generated peptide
atcaccacggggtcctccgg

SEQ ID NO: 7421 - DNA, 20 bp, Artificial
  Synthetically generated peptide
tcaccacggggtcctccggg

SEQ ID NO: 7422 - DNA, 20 bp, Artificial
  Synthetically generated peptide
caccacggggtcctccgggt

SEQ ID NO: 7423 - DNA, 20 bp, Artificial
  Synthetically generated peptide
accacggggtcctccgggtg

SEQ ID NO: 7424 - DNA, 20 bp, Artificial
  Synthetically generated peptide
ccacggggtcctccgggtgc

SEQ ID NO: 7425 - DNA, 20 bp, Artificial
  Synthetically generated peptide
cacggggtcctccgggtgcc

SEQ ID NO: 7426 - DNA, 20 bp, Artificial
  Synthetically generated peptide
acggggtcctccgggtgccc

SEQ ID NO: 7427 - DNA, 20 bp, Artificial
  Synthetically generated peptide
cggggtcctccgggtgccct

SEQ ID NO: 7428 - DNA, 20 bp, Artificial
  Synthetically generated peptide
ggggtcctccgggtgccctt

SEQ ID NO: 7429 - DNA, 20 bp, Artificial
  Synthetically generated peptide
gggtcctccgggtgcccttg

SEQ ID NO: 7430 - DNA, 20 bp, Artificial
  Synthetically generated peptide
ggtcctccgggtgcccttgg

SEQ ID NO: 7431 - DNA, 20 bp, Artificial
  Synthetically generated peptide
gtcctccgggtgcccttggc

SEQ ID NO: 7432 - DNA, 20 bp, Artificial
  Synthetically generated peptide
tcctccgggtgcccttggca

SEQ ID NO: 7433 - DNA, 20 bp, Artificial
  Synthetically generated peptide
cctccgggtgcccttggcaa

SEQ ID NO: 7434 - DNA, 20 bp, Artificial
  Synthetically generated peptide
ctccgggtgcccttggcaat

SEQ ID NO: 7435 - DNA, 20 bp, Artificial
  Synthetically generated peptide
tccgggtgcccttggcaata

SEQ ID NO: 7436 - DNA, 20 bp, Artificial
  Synthetically generated peptide
ccgggtgcccttggcaatac

SEQ ID NO: 7437 - DNA, 20 bp, Artificial
  Synthetically generated peptide
cgggtgcccttggcaataca

SEQ ID NO: 7438 - DNA, 20 bp, Artificial
  Synthetically generated peptide
acagcgaagctgcagaacgt

SEQ ID NO: 7439 - DNA, 26 bp, Artificial
  Synthetically generated peptide
cgacagccgtgggaaggtgcagtacg

SEQ ID NO: 7440 - DNA, 29 bp, Artificial
  Synthetically generated peptide
cgggattccctggagatgcctccagcgcg

SEQ ID NO: 7441 - DNA, 20 bp, Artificial
  Synthetically generated peptide
ccgggattccctggagatgc

SEQ ID NO: 7442 - DNA, 20 bp, Artificial
  Synthetically generated peptide
tccgggattccctggagatg

SEQ ID NO: 7443 - DNA, 20 bp, Artificial
  Synthetically generated peptide
ttccgggattccctggagat

SEQ ID NO: 7444 - DNA, 20 bp, Artificial
  Synthetically generated peptide
cttccgggattccctggaga

SEQ ID NO: 7445 - DNA, 20 bp, Artificial
  Synthetically generated peptide
ccttccgggattccctggag

SEQ ID NO: 7446 - DNA, 20 bp, Artificial
  Synthetically generated peptide
tccttccgggattccctgga

SEQ ID NO: 7447 - DNA, 20 bp, Artificial
  Synthetically generated peptide
atccttccgggattccctgg

SEQ ID NO: 7448 - DNA, 20 bp, Artificial
  Synthetically generated peptide
catccttccgggattccctg

SEQ ID NO: 7449 - DNA, 20 bp, Artificial
  Synthetically generated peptide
gcatccttccgggattccct

SEQ ID NO: 7450 - DNA, 20 bp, Artificial
  Synthetically generated peptide
cgcatccttccgggattccc

SEQ ID NO: 7451 - DNA, 20 bp, Artificial
  Synthetically generated peptide
acgcatccttccgggattcc

SEQ ID NO: 7452 - DNA, 20 bp, Artificial
  Synthetically generated peptide
tacgcatccttccgggattc

SEQ ID NO: 7453 - DNA, 20 bp, Artificial
  Synthetically generated peptide
gtacgcatccttccgggatt

SEQ ID NO: 7454 - DNA, 20 bp, Artificial
  Synthetically generated peptide
agtacgcatccttccgggat

SEQ ID NO: 7455 - DNA, 20 bp, Artificial
  Synthetically generated peptide
cagtacgcatccttccggga

SEQ ID NO: 7456 - DNA, 20 bp, Artificial
  Synthetically generated peptide
gcagtacgcatccttccggg

SEQ ID NO: 7457 - DNA, 20 bp, Artificial
  Synthetically generated peptide
tgcagtacgcatccttccgg

SEQ ID NO: 7458 - DNA, 20 bp, Artificial
  Synthetically generated peptide
gtgcagtacgcatccttccg

SEQ ID NO: 7459 - DNA, 20 bp, Artificial
  Synthetically generated peptide
ggtgcagtacgcatccttcc

SEQ ID NO: 7460 - DNA, 20 bp, Artificial
  Synthetically generated peptide
aggtgcagtacgcatccttc

SEQ ID NO: 7461 - DNA, 20 bp, Artificial
  Synthetically generated peptide
aaggtgcagtacgcatcctt

SEQ ID NO: 7462 - DNA, 20 bp, Artificial
  Synthetically generated peptide
gaaggtgcagtacgcatcct

SEQ ID NO: 7463 - DNA, 20 bp, Artificial
  Synthetically generated peptide
ggaaggtgcagtacgcatcc

SEQ ID NO: 7464 - DNA, 20 bp, Artificial
  Synthetically generated peptide
gggaaggtgcagtacgcatc

SEQ ID NO: 7465 - DNA, 20 bp, Artificial
  Synthetically generated peptide
tgggaaggtgcagtacgcat

SEQ ID NO: 7466 - DNA, 26 bp, Artificial
  Synthetically generated peptide
aggcggtcccagggctcaggtgtggg

SEQ ID NO: 7467 - DNA, 20 bp, Artificial
  Synthetically generated peptide
ggcggtcccagggctcaggt

SEQ ID NO: 7468 - DNA, 20 bp, Artificial
  Synthetically generated peptide
gcggtcccagggctcaggtg

SEQ ID NO: 7469 - DNA, 20 bp, Artificial
  Synthetically generated peptide
cggtcccagggctcaggtgt

SEQ ID NO: 7470 - DNA, 20 bp, Artificial
  Synthetically generated peptide
taggcggtcccagggctcag

SEQ ID NO: 7471 - DNA, 20 bp, Artificial
  Synthetically generated peptide
ataggcggtcccagggctca

SEQ ID NO: 7472 - DNA, 20 bp, Artificial
  Synthetically generated peptide
gataggcggtcccagggctc

SEQ ID NO: 7473 - DNA, 20 bp, Artificial
  Synthetically generated peptide
agataggcggtcccagggct

SEQ ID NO: 7474 - DNA, 20 bp, Artificial
  Synthetically generated peptide
cagataggcggtcccagggc

SEQ ID NO: 7475 - DNA, 20 bp, Artificial
  Synthetically generated peptide
gcagataggcggtcccaggg

SEQ ID NO: 7476 - DNA, 20 bp, Artificial
  Synthetically generated peptide
agcagataggcggtcccagg

SEQ ID NO: 7477 - DNA, 20 bp, Artificial
  Synthetically generated peptide
aagcagataggcggtcccag

SEQ ID NO: 7478 - DNA, 20 bp, Artificial
  Synthetically generated peptide
gaagcagataggcggtccca

SEQ ID NO: 7479 - DNA, 20 bp, Artificial
  Synthetically generated peptide
cgaagcagataggcggtccc

SEQ ID NO: 7480 - DNA, 20 bp, Artificial
  Synthetically generated peptide
ccgaagcagataggcggtcc

SEQ ID NO: 7481 - DNA, 20 bp, Artificial
  Synthetically generated peptide
cccgaagcagataggcggtc

SEQ ID NO: 7482 - DNA, 20 bp, Artificial
  Synthetically generated peptide
ccccgaagcagataggcggt

SEQ ID NO: 7483 - DNA, 20 bp, Artificial
  Synthetically generated peptide
accccgaagcagataggcgg

SEQ ID NO: 7484 - DNA, 20 bp, Artificial
  Synthetically generated peptide
caccccgaagcagataggcg

SEQ ID NO: 7485 - DNA, 20 bp, Artificial
  Synthetically generated peptide
ccaccccgaagcagataggc

SEQ ID NO: 7486 - DNA, 20 bp, Artificial
  Synthetically generated peptide
cccaccccgaagcagatagg

SEQ ID NO: 7487 - DNA, 20 bp, Artificial
  Synthetically generated peptide
ccccaccccgaagcagatag

SEQ ID NO: 7488 - DNA, 20 bp, Artificial
  Synthetically generated peptide
accccaccccgaagcagata

SEQ ID NO: 7489 - DNA, 20 bp, Artificial
  Synthetically generated peptide
gaccccaccccgaagcagat

SEQ ID NO: 7490 - DNA, 20 bp, Artificial
  Synthetically generated peptide
ggaccccaccccgaagcaga

SEQ ID NO: 7491 - DNA, 20 bp, Artificial
  Synthetically generated peptide
gggaccccaccccgaagcag

SEQ ID NO: 7492 - DNA, 20 bp, Artificial
  Synthetically generated peptide
tgggaccccaccccgaagca

SEQ ID NO: 7493 - DNA, 20 bp, Artificial
  Synthetically generated peptide
ctgggaccccaccccgaagc

SEQ ID NO: 7494 - DNA, 20 bp, Artificial
  Synthetically generated peptide
cctgggaccccaccccgaag

SEQ ID NO: 7495 - DNA, 20 bp, Artificial
  Synthetically generated peptide
tcctgggaccccaccccgaa

SEQ ID NO: 7496 - DNA, 20 bp, Artificial
  Synthetically generated peptide
gtcctgggaccccaccccga

SEQ ID NO: 7497 - DNA, 20 bp, Artificial
  Synthetically generated peptide
ggtcctgggaccccaccccg

SEQ ID NO: 7498 - DNA, 22 bp, Artificial
  Synthetically generated peptide
gcgtgcaccccgtggccagctc

SEQ ID NO: 7499 - DNA, 20 bp, Artificial
  Synthetically generated peptide
cgtgcaccccgtggccagct

SEQ ID NO: 7500 - DNA, 20 bp, Artificial
  Synthetically generated peptide
gtgcaccccgtggccagctc

SEQ ID NO: 7501 - DNA, 20 bp, Artificial
  Synthetically generated peptide
tgcaccccgtggccagctca

SEQ ID NO: 7502 - DNA, 20 bp, Artificial
  Synthetically generated peptide
gcaccccgtggccagctcat

SEQ ID NO: 7503 - DNA, 20 bp, Artificial
  Synthetically generated peptide
caccccgtggccagctcata

SEQ ID NO: 7504 - DNA, 20 bp, Artificial
  Synthetically generated peptide
accccgtggccagctcatat

SEQ ID NO: 7505 - DNA, 20 bp, Artificial
  Synthetically generated peptide
ccccgtggccagctcatatc

SEQ ID NO: 7506 - DNA, 20 bp, Artificial
  Synthetically generated peptide
cccgtggccagctcatatct

SEQ ID NO: 7507 - DNA, 20 bp, Artificial
  Synthetically generated peptide
ccgtggccagctcatatcta

SEQ ID NO: 7508 - DNA, 20 bp, Artificial
  Synthetically generated peptide
cgtggccagctcatatctaa

SEQ ID NO: 7509 - DNA, 20 bp, Artificial
  Synthetically generated peptide
ggcgtgcaccccgtggccag

SEQ ID NO: 7510 - DNA, 20 bp, Artificial
  Synthetically generated peptide
aggcgtgcaccccgtggcca

SEQ ID NO: 7511 - DNA, 20 bp, Artificial
  Synthetically generated peptide
caggcgtgcaccccgtggcc

SEQ ID NO: 7512 - DNA, 20 bp, Artificial
  Synthetically generated peptide
acaggcgtgcaccccgtggc

SEQ ID NO: 7513 - DNA, 20 bp, Artificial
  Synthetically generated peptide
cacaggcgtgcaccccgtgg

SEQ ID NO: 7514 - DNA, 20 bp, Artificial
  Synthetically generated peptide
ccacaggcgtgcaccccgtg

SEQ ID NO: 7515 - DNA, 20 bp, Artificial
  Synthetically generated peptide
accacaggcgtgcaccccgt

SEQ ID NO: 7516 - DNA, 20 bp, Artificial
  Synthetically generated peptide
gaccacaggcgtgcaccccg

SEQ ID NO: 7517 - DNA, 20 bp, Artificial
  Synthetically generated peptide
ggaccacaggcgtgcacccc

SEQ ID NO: 7518 - DNA, 20 bp, Artificial
  Synthetically generated peptide
gggaccacaggcgtgcaccc

SEQ ID NO: 7519 - DNA, 20 bp, Artificial
  Synthetically generated peptide
tgggaccacaggcgtgcacc

SEQ ID NO: 7520 - DNA, 20 bp, Artificial
  Synthetically generated peptide
ctgggaccacaggcgtgcac

SEQ ID NO: 7521 - DNA, 20 bp, Artificial
  Synthetically generated peptide
gctgggaccacaggcgtgca

SEQ ID NO: 7522 - DNA, 20 bp, Artificial
  Synthetically generated peptide
agctgggaccacaggcgtgc

SEQ ID NO: 7523 - DNA, 20 bp, Artificial
  Synthetically generated peptide
tagctgggaccacaggcgtg

SEQ ID NO: 7524 - DNA, 20 bp, Artificial
  Synthetically generated peptide
gtagctgggaccacaggcgt

SEQ ID NO: 7525 - DNA, 20 bp, Artificial
  Synthetically generated peptide
agtagctgggaccacaggcg

SEQ ID NO: 7526 - DNA, 22 bp, Artificial
  Synthetically generated peptide
caacgtacacgcaatccacaac

SEQ ID NO: 7527 - DNA, 20 bp, Artificial
  Synthetically generated peptide
aacgtacacgcaatccacaa

SEQ ID NO: 7528 - DNA, 20 bp, Artificial
  Synthetically generated peptide
acgtacacgcaatccacaac

SEQ ID NO: 7529 - DNA, 20 bp, Artificial
  Synthetically generated peptide
cgtacacgcaatccacaaca

SEQ ID NO: 7530 - DNA, 20 bp, Artificial
  Synthetically generated peptide
gtacacgcaatccacaacac

SEQ ID NO: 7531 - DNA, 20 bp, Artificial
  Synthetically generated peptide
tacacgcaatccacaacaca

SEQ ID NO: 7532 - DNA, 20 bp, Artificial
  Synthetically generated peptide
acacgcaatccacaacacat

SEQ ID NO: 7533 - DNA, 20 bp, Artificial
  Synthetically generated peptide
cacgcaatccacaacacata

SEQ ID NO: 7534 - DNA, 20 bp, Artificial
  Synthetically generated peptide
acgcaatccacaacacatac

SEQ ID NO: 7535 - DNA, 20 bp, Artificial
  Synthetically generated peptide
cgcaatccacaacacataca

SEQ ID NO: 7536 - DNA, 20 bp, Artificial
  Synthetically generated peptide
ccaacgtacacgcaatccac

SEQ ID NO: 7537 - DNA, 20 bp, Artificial
  Synthetically generated peptide
cccaacgtacacgcaatcca

SEQ ID NO: 7538 - DNA, 20 bp, Artificial
  Synthetically generated peptide
ccccaacgtacacgcaatcc

SEQ ID NO: 7539 - DNA, 20 bp, Artificial
  Synthetically generated peptide
tccccaacgtacacgcaatc

SEQ ID NO: 7540 - DNA, 20 bp, Artificial
  Synthetically generated peptide
atccccaacgtacacgcaat

SEQ ID NO: 7541 - DNA, 20 bp, Artificial
  Synthetically generated peptide
aatccccaacgtacacgcaa

SEQ ID NO: 7542 - DNA, 20 bp, Artificial
  Synthetically generated peptide
caatccccaacgtacacgca

SEQ ID NO: 7543 - DNA, 20 bp, Artificial
  Synthetically generated peptide
acaatccccaacgtacacgc

SEQ ID NO: 7544 - DNA, 20 bp, Artificial
  Synthetically generated peptide
cacaatccccaacgtacacg

SEQ ID NO: 7545 - DNA, 20 bp, Artificial
  Synthetically generated peptide
gcacaatccccaacgtacac

SEQ ID NO: 7546 - DNA, 20 bp, Artificial
  Synthetically generated peptide
tgcacaatccccaacgtaca

SEQ ID NO: 7547 - DNA, 20 bp, Artificial
  Synthetically generated peptide
atgcacaatccccaacgtac

SEQ ID NO: 7548 - DNA, 20 bp, Artificial
  Synthetically generated peptide
catgcacaatccccaacgta

SEQ ID NO: 7549 - DNA, 20 bp, Artificial
  Synthetically generated peptide
acatgcacaatccccaacgt

SEQ ID NO: 7550 - DNA, 20 bp, Artificial
  Synthetically generated peptide
aacatgcacaatccccaacg

SEQ ID NO: 7551 - DNA, 22 bp, Artificial
  Synthetically generated peptide
cgatgagggtattaactctggc

SEQ ID NO: 7552 - DNA, 24 bp, Artificial
  Synthetically generated peptide
cgggggtcctcagccgtccagacc

SEQ ID NO: 7553 - DNA, 20 bp, Artificial
  Synthetically generated peptide
gggggtcctcagccgtccag

SEQ ID NO: 7554 - DNA, 20 bp, Artificial
  Synthetically generated peptide
ggggtcctcagccgtccaga

SEQ ID NO: 7555 - DNA, 20 bp, Artificial
  Synthetically generated peptide
gggtcctcagccgtccagac

SEQ ID NO: 7556 - DNA, 20 bp, Artificial
  Synthetically generated peptide
ggtcctcagccgtccagacc

SEQ ID NO: 7557 - DNA, 20 bp, Artificial
  Synthetically generated peptide
gtcctcagccgtccagaccc

SEQ ID NO: 7558 - DNA, 20 bp, Artificial
  Synthetically generated peptide
tcctcagccgtccagaccct

SEQ ID NO: 7559 - DNA, 20 bp, Artificial
  Synthetically generated peptide
cctcagccgtccagaccctc

SEQ ID NO: 7560 - DNA, 20 bp, Artificial
  Synthetically generated peptide
ctcagccgtccagaccctcg

SEQ ID NO: 7561 - DNA, 20 bp, Artificial
  Synthetically generated peptide
tcagccgtccagaccctcgc

SEQ ID NO: 7562 - DNA, 20 bp, Artificial
  Synthetically generated peptide
cagccgtccagaccctcgca

SEQ ID NO: 7563 - DNA, 20 bp, Artificial
  Synthetically generated peptide
agccgtccagaccctcgcat

SEQ ID NO: 7564 - DNA, 20 bp, Artificial
  Synthetically generated peptide
gccgtccagaccctcgcatt

SEQ ID NO: 7565 - DNA, 20 bp, Artificial
  Synthetically generated peptide
ccgtccagaccctcgcatta

SEQ ID NO: 7566 - DNA, 20 bp, Artificial
  Synthetically generated peptide
cgtccagaccctcgcattat

SEQ ID NO: 7567 - DNA, 20 bp, Artificial
  Synthetically generated peptide
gtccagaccctcgcattata

SEQ ID NO: 7568 - DNA, 20 bp, Artificial
  Synthetically generated peptide
tccagaccctcgcattataa

SEQ ID NO: 7569 - DNA, 20 bp, Artificial
  Synthetically generated peptide
ccagaccctcgcattataaa

SEQ ID NO: 7570 - DNA, 20 bp, Artificial
  Synthetically generated peptide
cagaccctcgcattataaag

SEQ ID NO: 7571 - DNA, 20 bp, Artificial
  Synthetically generated peptide
agaccctcgcattataaagg

SEQ ID NO: 7572 - DNA, 20 bp, Artificial
  Synthetically generated peptide
gaccctcgcattataaaggg

SEQ ID NO: 7573 - DNA, 20 bp, Artificial
  Synthetically generated peptide
accctcgcattataaagggc

SEQ ID NO: 7574 - DNA, 20 bp, Artificial
  Synthetically generated peptide
ccctcgcattataaagggcc

SEQ ID NO: 7575 - DNA, 20 bp, Artificial
  Synthetically generated peptide
cctcgcattataaagggccg

SEQ ID NO: 7576 - DNA, 20 bp, Artificial
  Synthetically generated peptide
ctcgcattataaagggccgg

SEQ ID NO: 7577 - DNA, 20 bp, Artificial
  Synthetically generated peptide
tcgcattataaagggccggt

SEQ ID NO: 7578 - DNA, 20 bp, Artificial
  Synthetically generated peptide
cgcattataaagggccggtg

SEQ ID NO: 7579 - DNA, 20 bp, Artificial
  Synthetically generated peptide
gcattataaagggccggtgg

SEQ ID NO: 7580 - DNA, 20 bp, Artificial
  Synthetically generated peptide
cattataaagggccggtggg

SEQ ID NO: 7581 - DNA, 20 bp, Artificial
  Synthetically generated peptide
attataaagggccggtgggc

SEQ ID NO: 7582 - DNA, 20 bp, Artificial
  Synthetically generated peptide
ttataaagggccggtgggcg

SEQ ID NO: 7583 - DNA, 20 bp, Artificial
  Synthetically generated peptide
tcgggggtcctcagccgtcc

SEQ ID NO: 7584 - DNA, 20 bp, Artificial
  Synthetically generated peptide
ctcgggggtcctcagccgtc

SEQ ID NO: 7585 - DNA, 20 bp, Artificial
  Synthetically generated peptide
gctcgggggtcctcagccgt

SEQ ID NO: 7586 - DNA, 20 bp, Artificial
  Synthetically generated peptide
agctcgggggtcctcagccg

SEQ ID NO: 7587 - DNA, 20 bp, Artificial
  Synthetically generated peptide
cagctcgggggtcctcagcc

SEQ ID NO: 7588 - DNA, 20 bp, Artificial
  Synthetically generated peptide
acagctcgggggtcctcagc

SEQ ID NO: 7589 - DNA, 20 bp, Artificial
  Synthetically generated peptide
cacagctcgggggtcctcag

SEQ ID NO: 7590 - DNA, 20 bp, Artificial
  Synthetically generated peptide
gcacagctcgggggtcctca

SEQ ID NO: 7591 - DNA, 20 bp, Artificial
  Synthetically generated peptide
agcacagctcgggggtcctc

SEQ ID NO: 7592 - DNA, 20 bp, Artificial
  Synthetically generated peptide
cagcacagctcgggggtcct

SEQ ID NO: 7593 - DNA, 20 bp, Artificial
  Synthetically generated peptide
gcagcacagctcgggggtcc

SEQ ID NO: 7594 - DNA, 20 bp, Artificial
  Synthetically generated peptide
agcagcacagctcgggggtc

SEQ ID NO: 7595 - DNA, 20 bp, Artificial
  Synthetically generated peptide
gagcagcacagctcgggggt

SEQ ID NO: 7596 - DNA, 20 bp, Artificial
  Synthetically generated peptide
cgagcagcacagctcggggg

SEQ ID NO: 7597 - DNA, 20 bp, Artificial
  Synthetically generated peptide
gcgagcagcacagctcgggg

SEQ ID NO: 7598 - DNA, 20 bp, Artificial
  Synthetically generated peptide
cgcgagcagcacagctcggg

SEQ ID NO: 7599 - DNA, 20 bp, Artificial
  Synthetically generated peptide
ccgcgagcagcacagctcgg

SEQ ID NO: 7600 - DNA, 20 bp, Artificial
  Synthetically generated peptide
gccgcgagcagcacagctcg

SEQ ID NO: 7601 - DNA, 20 bp, Artificial
  Synthetically generated peptide
ggccgcgagcagcacagctc

SEQ ID NO: 7602 - DNA, 24 bp, Artificial
  Synthetically generated peptide
cgcttatggggagggtggggaggg

SEQ ID NO: 7603 - DNA, 24 bp, Artificial
  Synthetically generated peptide
cggtgggcggagattagcgagaga

SEQ ID NO: 7604 - DNA, 20 bp, Artificial
  Synthetically generated peptide
ccggtgggcggagattagcg

SEQ ID NO: 7605 - DNA, 20 bp, Artificial
  Synthetically generated peptide
gccggtgggcggagattagc

SEQ ID NO: 7606 - DNA, 26 bp, Artificial
  Synthetically generated peptide
ggcgcttatggggagggtggggaggg

SEQ ID NO: 7607 - DNA, 22 bp, Artificial
  Synthetically generated peptide
cgcgaccctgcgcggggcaccg

SEQ ID NO: 7608 - DNA, 20 bp, Artificial
  Synthetically generated peptide
gcgaccctgcgcggggcacc

SEQ ID NO: 7609 - DNA, 20 bp, Artificial
  Synthetically generated peptide
cgaccctgcgcggggcaccg

SEQ ID NO: 7610 - DNA, 20 bp, Artificial
  Synthetically generated peptide
gaccctgcgcggggcaccga

SEQ ID NO: 7611 - DNA, 20 bp, Artificial
  Synthetically generated peptide
accctgcgcggggcaccgag

SEQ ID NO: 7612 - DNA, 20 bp, Artificial
  Synthetically generated peptide
ccctgcgcggggcaccgagt

SEQ ID NO: 7613 - DNA, 20 bp, Artificial
  Synthetically generated peptide
cctgcgcggggcaccgagtg

SEQ ID NO: 7614 - DNA, 20 bp, Artificial
  Synthetically generated peptide
ctgcgcggggcaccgagtgc

SEQ ID NO: 7615 - DNA, 20 bp, Artificial
  Synthetically generated peptide
tgcgcggggcaccgagtgcg

SEQ ID NO: 7616 - DNA, 20 bp, Artificial
  Synthetically generated peptide
gcgcggggcaccgagtgcgc

SEQ ID NO: 7617 - DNA, 20 bp, Artificial
  Synthetically generated peptide
cgcggggcaccgagtgcgct

SEQ ID NO: 7618 - DNA, 20 bp, Artificial
  Synthetically generated peptide
gcggggcaccgagtgcgctg

SEQ ID NO: 7619 - DNA, 20 bp, Artificial
  Synthetically generated peptide
cggggcaccgagtgcgctgc

SEQ ID NO: 7620 - DNA, 20 bp, Artificial
  Synthetically generated peptide
ggggcaccgagtgcgctgct

SEQ ID NO: 7621 - DNA, 20 bp, Artificial
  Synthetically generated peptide
gggcaccgagtgcgctgctg

SEQ ID NO: 7622 - DNA, 20 bp, Artificial
  Synthetically generated peptide
ggcaccgagtgcgctgctgt

SEQ ID NO: 7623 - DNA, 20 bp, Artificial
  Synthetically generated peptide
gcaccgagtgcgctgctgtg

SEQ ID NO: 7624 - DNA, 20 bp, Artificial
  Synthetically generated peptide
caccgagtgcgctgctgtgc

SEQ ID NO: 7625 - DNA, 20 bp, Artificial
  Synthetically generated peptide
accgagtgcgctgctgtgcg

SEQ ID NO: 7626 - DNA, 20 bp, Artificial
  Synthetically generated peptide
ccgagtgcgctgctgtgcga

SEQ ID NO: 7627 - DNA, 20 bp, Artificial
  Synthetically generated peptide
cgagtgcgctgctgtgcgag

SEQ ID NO: 7628 - DNA, 20 bp, Artificial
  Synthetically generated peptide
gagtgcgctgctgtgcgagt

SEQ ID NO: 7629 - DNA, 20 bp, Artificial
  Synthetically generated peptide
agtgcgctgctgtgcgagtg

SEQ ID NO: 7630 - DNA, 20 bp, Artificial
  Synthetically generated peptide
gtgcgctgctgtgcgagtgg

SEQ ID NO: 7631 - DNA, 20 bp, Artificial
  Synthetically generated peptide
tgcgctgctgtgcgagtggg

SEQ ID NO: 7632 - DNA, 20 bp, Artificial
  Synthetically generated peptide
gcgctgctgtgcgagtggga

SEQ ID NO: 7633 - DNA, 20 bp, Artificial
  Synthetically generated peptide
cgctgctgtgcgagtgggat

SEQ ID NO: 7634 - DNA, 20 bp, Artificial
  Synthetically generated peptide
gctgctgtgcgagtgggatc

SEQ ID NO: 7635 - DNA, 20 bp, Artificial
  Synthetically generated peptide
ctgctgtgcgagtgggatcc

SEQ ID NO: 7636 - DNA, 20 bp, Artificial
  Synthetically generated peptide
tgctgtgcgagtgggatccg

SEQ ID NO: 7637 - DNA, 20 bp, Artificial
  Synthetically generated peptide
gctgtgcgagtgggatccgc

SEQ ID NO: 7638 - DNA, 20 bp, Artificial
  Synthetically generated peptide
ctgtgcgagtgggatccgcc

SEQ ID NO: 7639 - DNA, 20 bp, Artificial
  Synthetically generated peptide
tgtgcgagtgggatccgccg

SEQ ID NO: 7640 - DNA, 20 bp, Artificial
  Synthetically generated peptide
gtgcgagtgggatccgccgc

SEQ ID NO: 7641 - DNA, 20 bp, Artificial
  Synthetically generated peptide
tgcgagtgggatccgccgcg

SEQ ID NO: 7642 - DNA, 20 bp, Artificial
  Synthetically generated peptide
gcgagtgggatccgccgcgt

SEQ ID NO: 7643 - DNA, 20 bp, Artificial
  Synthetically generated peptide
cgagtgggatccgccgcgtc

SEQ ID NO: 7644 - DNA, 20 bp, Artificial
  Synthetically generated peptide
gagtgggatccgccgcgtcc

SEQ ID NO: 7645 - DNA, 20 bp, Artificial
  Synthetically generated peptide
agtgggatccgccgcgtcct

SEQ ID NO: 7646 - DNA, 20 bp, Artificial
  Synthetically generated peptide
gtgggatccgccgcgtcctt

SEQ ID NO: 7647 - DNA, 20 bp, Artificial
  Synthetically generated peptide
tgggatccgccgcgtccttg

SEQ ID NO: 7648 - DNA, 20 bp, Artificial
  Synthetically generated peptide
gggatccgccgcgtccttgc

SEQ ID NO: 7649 - DNA, 20 bp, Artificial
  Synthetically generated peptide
ggatccgccgcgtccttgct

SEQ ID NO: 7650 - DNA, 20 bp, Artificial
  Synthetically generated peptide
gatccgccgcgtccttgctc

SEQ ID NO: 7651 - DNA, 20 bp, Artificial
  Synthetically generated peptide
atccgccgcgtccttgctct

SEQ ID NO: 7652 - DNA, 20 bp, Artificial
  Synthetically generated peptide
tccgccgcgtccttgctctg

SEQ ID NO: 7653 - DNA, 20 bp, Artificial
  Synthetically generated peptide
ccgccgcgtccttgctctgc

SEQ ID NO: 7654 - DNA, 20 bp, Artificial
  Synthetically generated peptide
cgccgcgtccttgctctgcc

SEQ ID NO: 7655 - DNA, 20 bp, Artificial
  Synthetically generated peptide
gccgcgtccttgctctgccc

SEQ ID NO: 7656 - DNA, 20 bp, Artificial
  Synthetically generated peptide
ccgcgtccttgctctgcccg

SEQ ID NO: 7657 - DNA, 20 bp, Artificial
  Synthetically generated peptide
cgcgtccttgctctgcccgc

SEQ ID NO: 7658 - DNA, 20 bp, Artificial
  Synthetically generated peptide
gcgtccttgctctgcccgcg

SEQ ID NO: 7659 - DNA, 20 bp, Artificial
  Synthetically generated peptide
cgtccttgctctgcccgcgc

SEQ ID NO: 7660 - DNA, 20 bp, Artificial
  Synthetically generated peptide
gtccttgctctgcccgcgcc

SEQ ID NO: 7661 - DNA, 20 bp, Artificial
  Synthetically generated peptide
tccttgctctgcccgcgccg

SEQ ID NO: 7662 - DNA, 20 bp, Artificial
  Synthetically generated peptide
ccttgctctgcccgcgccgc

SEQ ID NO: 7663 - DNA, 20 bp, Artificial
  Synthetically generated peptide
cttgctctgcccgcgccgcc

SEQ ID NO: 7664 - DNA, 20 bp, Artificial
  Synthetically generated peptide
ttgctctgcccgcgccgcca

SEQ ID NO: 7665 - DNA, 20 bp, Artificial
  Synthetically generated peptide
tgctctgcccgcgccgccac

SEQ ID NO: 7666 - DNA, 20 bp, Artificial
  Synthetically generated peptide
gctctgcccgcgccgccacc

SEQ ID NO: 7667 - DNA, 20 bp, Artificial
  Synthetically generated peptide
ctctgcccgcgccgccaccg

SEQ ID NO: 7668 - DNA, 20 bp, Artificial
  Synthetically generated peptide
tctgcccgcgccgccaccgc

SEQ ID NO: 7669 - DNA, 20 bp, Artificial
  Synthetically generated peptide
ctgcccgcgccgccaccgcc

SEQ ID NO: 7670 - DNA, 20 bp, Artificial
  Synthetically generated peptide
tgcccgcgccgccaccgccg

SEQ ID NO: 7671 - DNA, 20 bp, Artificial
  Synthetically generated peptide
gcccgcgccgccaccgccgc

SEQ ID NO: 7672 - DNA, 20 bp, Artificial
  Synthetically generated peptide
cccgcgccgccaccgccgcc

SEQ ID NO: 7673 - DNA, 20 bp, Artificial
  Synthetically generated peptide
ccgcgccgccaccgccgccg

SEQ ID NO: 7674 - DNA, 20 bp, Artificial
  Synthetically generated peptide
cgcgccgccaccgccgccgt

SEQ ID NO: 7675 - DNA, 20 bp, Artificial
  Synthetically generated peptide
gcgccgccaccgccgccgtc

SEQ ID NO: 7676 - DNA, 20 bp, Artificial
  Synthetically generated peptide
cgccgccaccgccgccgtct

SEQ ID NO: 7677 - DNA, 20 bp, Artificial
  Synthetically generated peptide
gccgccaccgccgccgtctc

SEQ ID NO: 7678 - DNA, 20 bp, Artificial
  Synthetically generated peptide
ccgccaccgccgccgtctcc

SEQ ID NO: 7679 - DNA, 20 bp, Artificial
  Synthetically generated peptide
cgccaccgccgccgtctccc

SEQ ID NO: 7680 - DNA, 20 bp, Artificial
  Synthetically generated peptide
gccaccgccgccgtctcccg

SEQ ID NO: 7681 - DNA, 20 bp, Artificial
  Synthetically generated peptide
ccaccgccgccgtctcccgg

SEQ ID NO: 7682 - DNA, 20 bp, Artificial
  Synthetically generated peptide
caccgccgccgtctcccggg

SEQ ID NO: 7683 - DNA, 20 bp, Artificial
  Synthetically generated peptide
accgccgccgtctcccgggg

SEQ ID NO: 7684 - DNA, 20 bp, Artificial
  Synthetically generated peptide
ccgccgccgtctcccggggc

SEQ ID NO: 7685 - DNA, 20 bp, Artificial
  Synthetically generated peptide
cgccgccgtctcccggggcc

SEQ ID NO: 7686 - DNA, 20 bp, Artificial
  Synthetically generated peptide
gccgccgtctcccggggccc

SEQ ID NO: 7687 - DNA, 20 bp, Artificial
  Synthetically generated peptide
ccgccgtctcccggggcccc

SEQ ID NO: 7688 - DNA, 20 bp, Artificial
  Synthetically generated peptide
cgccgtctcccggggccccc

SEQ ID NO: 7689 - DNA, 20 bp, Artificial
  Synthetically generated peptide
gccgtctcccggggcccccg

SEQ ID NO: 7690 - DNA, 20 bp, Artificial
  Synthetically generated peptide
ccgtctcccggggcccccgc

SEQ ID NO: 7691 - DNA, 20 bp, Artificial
  Synthetically generated peptide
cgtctcccggggcccccgcg

SEQ ID NO: 7692 - DNA, 20 bp, Artificial
  Synthetically generated peptide
gtctcccggggcccccgcgc

SEQ ID NO: 7693 - DNA, 20 bp, Artificial
  Synthetically generated peptide
tctcccggggcccccgcgca

SEQ ID NO: 7694 - DNA, 20 bp, Artificial
  Synthetically generated peptide
ctcccggggcccccgcgcac

SEQ ID NO: 7695 - DNA, 20 bp, Artificial
  Synthetically generated peptide
tcccggggcccccgcgcacg

SEQ ID NO: 7696 - DNA, 20 bp, Artificial
  Synthetically generated peptide
cccggggcccccgcgcacgc

SEQ ID NO: 7697 - DNA, 20 bp, Artificial
  Synthetically generated peptide
ccggggcccccgcgcacgct

SEQ ID NO: 7698 - DNA, 20 bp, Artificial
  Synthetically generated peptide
cggggcccccgcgcacgctc

SEQ ID NO: 7699 - DNA, 20 bp, Artificial
  Synthetically generated peptide
ggggcccccgcgcacgctcc

SEQ ID NO: 7700 - DNA, 20 bp, Artificial
  Synthetically generated peptide
gggcccccgcgcacgctcct

SEQ ID NO: 7701 - DNA, 20 bp, Artificial
  Synthetically generated peptide
ggcccccgcgcacgctcctc

SEQ ID NO: 7702 - DNA, 20 bp, Artificial
  Synthetically generated peptide
gcccccgcgcacgctcctcc

SEQ ID NO: 7703 - DNA, 20 bp, Artificial
  Synthetically generated peptide
cccccgcgcacgctcctccg

SEQ ID NO: 7704 - DNA, 20 bp, Artificial
  Synthetically generated peptide
ccccgcgcacgctcctccgc

SEQ ID NO: 7705 - DNA, 20 bp, Artificial
  Synthetically generated peptide
cccgcgcacgctcctccgcg

SEQ ID NO: 7706 - DNA, 20 bp, Artificial
  Synthetically generated peptide
ccgcgcacgctcctccgcgt

SEQ ID NO: 7707 - DNA, 20 bp, Artificial
  Synthetically generated peptide
cgcgcacgctcctccgcgtg

SEQ ID NO: 7708 - DNA, 20 bp, Artificial
  Synthetically generated peptide
gcgcacgctcctccgcgtgc

SEQ ID NO: 7709 - DNA, 20 bp, Artificial
  Synthetically generated peptide
cgcacgctcctccgcgtgct

SEQ ID NO: 7710 - DNA, 20 bp, Artificial
  Synthetically generated peptide
gcacgctcctccgcgtgctc

SEQ ID NO: 7711 - DNA, 20 bp, Artificial
  Synthetically generated peptide
cacgctcctccgcgtgctct

SEQ ID NO: 7712 - DNA, 20 bp, Artificial
  Synthetically generated peptide
acgctcctccgcgtgctctc

SEQ ID NO: 7713 - DNA, 20 bp, Artificial
  Synthetically generated peptide
cgctcctccgcgtgctctcg

SEQ ID NO: 7714 - DNA, 20 bp, Artificial
  Synthetically generated peptide
gctcctccgcgtgctctcgc

SEQ ID NO: 7715 - DNA, 20 bp, Artificial
  Synthetically generated peptide
ctcctccgcgtgctctcgcc

SEQ ID NO: 7716 - DNA, 20 bp, Artificial
  Synthetically generated peptide
tcctccgcgtgctctcgcct

SEQ ID NO: 7717 - DNA, 20 bp, Artificial
  Synthetically generated peptide
cctccgcgtgctctcgccta

SEQ ID NO: 7718 - DNA, 20 bp, Artificial
  Synthetically generated peptide
ctccgcgtgctctcgcctac

SEQ ID NO: 7719 - DNA, 20 bp, Artificial
  Synthetically generated peptide
tccgcgtgctctcgcctacc

SEQ ID NO: 7720 - DNA, 20 bp, Artificial
  Synthetically generated peptide
ccgcgtgctctcgcctaccg

SEQ ID NO: 7721 - DNA, 20 bp, Artificial
  Synthetically generated peptide
cgcgtgctctcgcctaccgc

SEQ ID NO: 7722 - DNA, 20 bp, Artificial
  Synthetically generated peptide
gcgtgctctcgcctaccgct

SEQ ID NO: 7723 - DNA, 20 bp, Artificial
  Synthetically generated peptide
cgtgctctcgcctaccgctg

SEQ ID NO: 7724 - DNA, 20 bp, Artificial
  Synthetically generated peptide
gtgctctcgcctaccgctgc

SEQ ID NO: 7725 - DNA, 20 bp, Artificial
  Synthetically generated peptide
tgctctcgcctaccgctgcc

SEQ ID NO: 7726 - DNA, 20 bp, Artificial
  Synthetically generated peptide
gctctcgcctaccgctgccg

SEQ ID NO: 7727 - DNA, 20 bp, Artificial
  Synthetically generated peptide
ctctcgcctaccgctgccga

SEQ ID NO: 7728 - DNA, 20 bp, Artificial
  Synthetically generated peptide
tctcgcctaccgctgccgag

SEQ ID NO: 7729 - DNA, 20 bp, Artificial
  Synthetically generated peptide
ctcgcctaccgctgccgagg

SEQ ID NO: 7730 - DNA, 20 bp, Artificial
  Synthetically generated peptide
tcgcctaccgctgccgagga

SEQ ID NO: 7731 - DNA, 20 bp, Artificial
  Synthetically generated peptide
cgcctaccgctgccgaggaa

SEQ ID NO: 7732 - DNA, 20 bp, Artificial
  Synthetically generated peptide
gcctaccgctgccgaggaaa

SEQ ID NO: 7733 - DNA, 20 bp, Artificial
  Synthetically generated peptide
cctaccgctgccgaggaaac

SEQ ID NO: 7734 - DNA, 20 bp, Artificial
  Synthetically generated peptide
ctaccgctgccgaggaaact

SEQ ID NO: 7735 - DNA, 20 bp, Artificial
  Synthetically generated peptide
taccgctgccgaggaaactg

SEQ ID NO: 7736 - DNA, 20 bp, Artificial
  Synthetically generated peptide
accgctgccgaggaaactga

SEQ ID NO: 7737 - DNA, 20 bp, Artificial
  Synthetically generated peptide
ccgctgccgaggaaactgac

SEQ ID NO: 7738 - DNA, 20 bp, Artificial
  Synthetically generated peptide
cgctgccgaggaaactgacg

SEQ ID NO: 7739 - DNA, 20 bp, Artificial
  Synthetically generated peptide
gctgccgaggaaactgacgg

SEQ ID NO: 7740 - DNA, 20 bp, Artificial
  Synthetically generated peptide
ctgccgaggaaactgacgga

SEQ ID NO: 7741 - DNA, 21 bp, Artificial
  Synthetically generated peptide
gtgcgagtgggatccgccgcg

SEQ ID NO: 7742 - DNA, 20 bp, Artificial
  Synthetically generated peptide
tgcgagtgggatccgccgcg

SEQ ID NO: 7743 - DNA, 20 bp, Artificial
  Synthetically generated peptide
gcgagtgggatccgccgcgt

SEQ ID NO: 7744 - DNA, 20 bp, Artificial
  Synthetically generated peptide
cgagtgggatccgccgcgtc

SEQ ID NO: 7745 - DNA, 20 bp, Artificial
  Synthetically generated peptide
gagtgggatccgccgcgtcc

SEQ ID NO: 7746 - DNA, 20 bp, Artificial
  Synthetically generated peptide
agtgggatccgccgcgtcct

SEQ ID NO: 7747 - DNA, 20 bp, Artificial
  Synthetically generated peptide
gtgggatccgccgcgtcctt

SEQ ID NO: 7748 - DNA, 20 bp, Artificial
  Synthetically generated peptide
tgggatccgccgcgtccttg

SEQ ID NO: 7749 - DNA, 20 bp, Artificial
  Synthetically generated peptide
gggatccgccgcgtccttgc

SEQ ID NO: 7750 - DNA, 20 bp, Artificial
  Synthetically generated peptide
ggatccgccgcgtccttgct

SEQ ID NO: 7751 - DNA, 20 bp, Artificial
  Synthetically generated peptide
gatccgccgcgtccttgctc

SEQ ID NO: 7752 - DNA, 20 bp, Artificial
  Synthetically generated peptide
atccgccgcgtccttgctct

SEQ ID NO: 7753 - DNA, 20 bp, Artificial
  Synthetically generated peptide
tccgccgcgtccttgctctg

SEQ ID NO: 7754 - DNA, 20 bp, Artificial
  Synthetically generated peptide
ccgccgcgtccttgctctgc

SEQ ID NO: 7755 - DNA, 20 bp, Artificial
  Synthetically generated peptide
cgccgcgtccttgctctgcc

SEQ ID NO: 7756 - DNA, 20 bp, Artificial
  Synthetically generated peptide
gccgcgtccttgctctgccc

SEQ ID NO: 7757 - DNA, 20 bp, Artificial
  Synthetically generated peptide
ccgcgtccttgctctgcccg

SEQ ID NO: 7758 - DNA, 20 bp, Artificial
  Synthetically generated peptide
cgcgtccttgctctgcccgc

SEQ ID NO: 7759 - DNA, 20 bp, Artificial
  Synthetically generated peptide
gcgtccttgctctgcccgcg

SEQ ID NO: 7760 - DNA, 20 bp, Artificial
  Synthetically generated peptide
cgtccttgctctgcccgcgc

SEQ ID NO: 7761 - DNA, 20 bp, Artificial
  Synthetically generated peptide
gtccttgctctgcccgcgcc

SEQ ID NO: 7762 - DNA, 20 bp, Artificial
  Synthetically generated peptide
tccttgctctgcccgcgccg

SEQ ID NO: 7763 - DNA, 20 bp, Artificial
  Synthetically generated peptide
ccttgctctgcccgcgccgc

SEQ ID NO: 7764 - DNA, 20 bp, Artificial
  Synthetically generated peptide
cttgctctgcccgcgccgcc

SEQ ID NO: 7765 - DNA, 20 bp, Artificial
  Synthetically generated peptide
ttgctctgcccgcgccgcca

SEQ ID NO: 7766 - DNA, 20 bp, Artificial
  Synthetically generated peptide
tgctctgcccgcgccgccac

SEQ ID NO: 7767 - DNA, 20 bp, Artificial
  Synthetically generated peptide
gctctgcccgcgccgccacc

SEQ ID NO: 7768 - DNA, 20 bp, Artificial
  Synthetically generated peptide
ctctgcccgcgccgccaccg

SEQ ID NO: 7769 - DNA, 20 bp, Artificial
  Synthetically generated peptide
tctgcccgcgccgccaccgc

SEQ ID NO: 7770 - DNA, 20 bp, Artificial
  Synthetically generated peptide
ctgcccgcgccgccaccgcc

SEQ ID NO: 7771 - DNA, 20 bp, Artificial
  Synthetically generated peptide
tgcccgcgccgccaccgccg

SEQ ID NO: 7772 - DNA, 20 bp, Artificial
  Synthetically generated peptide
gcccgcgccgccaccgccgc

SEQ ID NO: 7773 - DNA, 20 bp, Artificial
  Synthetically generated peptide
cccgcgccgccaccgccgcc

SEQ ID NO: 7774 - DNA, 20 bp, Artificial
  Synthetically generated peptide
ccgcgccgccaccgccgccg

SEQ ID NO: 7775 - DNA, 20 bp, Artificial
  Synthetically generated peptide
cgcgccgccaccgccgccgt

SEQ ID NO: 7776 - DNA, 20 bp, Artificial
  Synthetically generated peptide
gcgccgccaccgccgccgtc

SEQ ID NO: 7777 - DNA, 20 bp, Artificial
  Synthetically generated peptide
cgccgccaccgccgccgtct

SEQ ID NO: 7778 - DNA, 20 bp, Artificial
  Synthetically generated peptide
gccgccaccgccgccgtctc

SEQ ID NO: 7779 - DNA, 20 bp, Artificial
  Synthetically generated peptide
ccgccaccgccgccgtctcc

SEQ ID NO: 7780 - DNA, 20 bp, Artificial
  Synthetically generated peptide
cgccaccgccgccgtctccc

SEQ ID NO: 7781 - DNA, 20 bp, Artificial
  Synthetically generated peptide
gccaccgccgccgtctcccg

SEQ ID NO: 7782 - DNA, 20 bp, Artificial
  Synthetically generated peptide
ccaccgccgccgtctcccgg

SEQ ID NO: 7783 - DNA, 20 bp, Artificial
  Synthetically generated peptide
caccgccgccgtctcccggg

SEQ ID NO: 7784 - DNA, 20 bp, Artificial
  Synthetically generated peptide
accgccgccgtctcccgggg

SEQ ID NO: 7785 - DNA, 20 bp, Artificial
  Synthetically generated peptide
ccgccgccgtctcccggggc

SEQ ID NO: 7786 - DNA, 20 bp, Artificial
  Synthetically generated peptide
cgccgccgtctcccggggcc

SEQ ID NO: 7787 - DNA, 20 bp, Artificial
  Synthetically generated peptide
gccgccgtctcccggggccc

SEQ ID NO: 7788 - DNA, 20 bp, Artificial
  Synthetically generated peptide
ccgccgtctcccggggcccc

SEQ ID NO: 7789 - DNA, 20 bp, Artificial
  Synthetically generated peptide
cgccgtctcccggggccccc

SEQ ID NO: 7790 - DNA, 20 bp, Artificial
  Synthetically generated peptide
gccgtctcccggggcccccg

SEQ ID NO: 7791 - DNA, 20 bp, Artificial
  Synthetically generated peptide
ccgtctcccggggcccccgc

SEQ ID NO: 7792 - DNA, 20 bp, Artificial
  Synthetically generated peptide
cgtctcccggggcccccgcg

SEQ ID NO: 7793 - DNA, 20 bp, Artificial
  Synthetically generated peptide
gtctcccggggcccccgcgc

SEQ ID NO: 7794 - DNA, 20 bp, Artificial
  Synthetically generated peptide
tctcccggggcccccgcgca

SEQ ID NO: 7795 - DNA, 20 bp, Artificial
  Synthetically generated peptide
ctcccggggcccccgcgcac

SEQ ID NO: 7796 - DNA, 20 bp, Artificial
  Synthetically generated peptide
tcccggggcccccgcgcacg

SEQ ID NO: 7797 - DNA, 20 bp, Artificial
  Synthetically generated peptide
cccggggcccccgcgcacgc

SEQ ID NO: 7798 - DNA, 20 bp, Artificial
  Synthetically generated peptide
ccggggcccccgcgcacgct

SEQ ID NO: 7799 - DNA, 20 bp, Artificial
  Synthetically generated peptide
cggggcccccgcgcacgctc

SEQ ID NO: 7800 - DNA, 20 bp, Artificial
  Synthetically generated peptide
ggggcccccgcgcacgctcc

SEQ ID NO: 7801 - DNA, 20 bp, Artificial
  Synthetically generated peptide
gggcccccgcgcacgctcct

SEQ ID NO: 7802 - DNA, 20 bp, Artificial
  Synthetically generated peptide
ggcccccgcgcacgctcctc

SEQ ID NO: 7803 - DNA, 20 bp, Artificial
  Synthetically generated peptide
gcccccgcgcacgctcctcc

SEQ ID NO: 7804 - DNA, 20 bp, Artificial
  Synthetically generated peptide
cccccgcgcacgctcctccg

SEQ ID NO: 7805 - DNA, 20 bp, Artificial
  Synthetically generated peptide
ccccgcgcacgctcctccgc

SEQ ID NO: 7806 - DNA, 20 bp, Artificial
  Synthetically generated peptide
cccgcgcacgctcctccgcg

SEQ ID NO: 7807 - DNA, 20 bp, Artificial
  Synthetically generated peptide
ccgcgcacgctcctccgcgt

SEQ ID NO: 7808 - DNA, 20 bp, Artificial
  Synthetically generated peptide
cgcgcacgctcctccgcgtg

SEQ ID NO: 7809 - DNA, 20 bp, Artificial
  Synthetically generated peptide
gcgcacgctcctccgcgtgc

SEQ ID NO: 7810 - DNA, 20 bp, Artificial
  Synthetically generated peptide
cgcacgctcctccgcgtgct

SEQ ID NO: 7811 - DNA, 20 bp, Artificial
  Synthetically generated peptide
gcacgctcctccgcgtgctc

SEQ ID NO: 7812 - DNA, 20 bp, Artificial
  Synthetically generated peptide
cacgctcctccgcgtgctct

SEQ ID NO: 7813 - DNA, 20 bp, Artificial
  Synthetically generated peptide
acgctcctccgcgtgctctc

SEQ ID NO: 7814 - DNA, 20 bp, Artificial
  Synthetically generated peptide
cgctcctccgcgtgctctcg

SEQ ID NO: 7815 - DNA, 20 bp, Artificial
  Synthetically generated peptide
gctcctccgcgtgctctcgc

SEQ ID NO: 7816 - DNA, 20 bp, Artificial
  Synthetically generated peptide
ctcctccgcgtgctctcgcc

SEQ ID NO: 7817 - DNA, 20 bp, Artificial
  Synthetically generated peptide
tcctccgcgtgctctcgcct

SEQ ID NO: 7818 - DNA, 20 bp, Artificial
  Synthetically generated peptide
cctccgcgtgctctcgccta

SEQ ID NO: 7819 - DNA, 20 bp, Artificial
  Synthetically generated peptide
ctccgcgtgctctcgcctac

SEQ ID NO: 7820 - DNA, 20 bp, Artificial
  Synthetically generated peptide
tccgcgtgctctcgcctacc

SEQ ID NO: 7821 - DNA, 20 bp, Artificial
  Synthetically generated peptide
ccgcgtgctctcgcctaccg

SEQ ID NO: 7822 - DNA, 20 bp, Artificial
  Synthetically generated peptide
cgcgtgctctcgcctaccgc

SEQ ID NO: 7823 - DNA, 20 bp, Artificial
  Synthetically generated peptide
gcgtgctctcgcctaccgct

SEQ ID NO: 7824 - DNA, 20 bp, Artificial
  Synthetically generated peptide
cgtgctctcgcctaccgctg

SEQ ID NO: 7825 - DNA, 20 bp, Artificial
  Synthetically generated peptide
gtgctctcgcctaccgctgc

SEQ ID NO: 7826 - DNA, 20 bp, Artificial
  Synthetically generated peptide
tgctctcgcctaccgctgcc

SEQ ID NO: 7827 - DNA, 20 bp, Artificial
  Synthetically generated peptide
gctctcgcctaccgctgccg

SEQ ID NO: 7828 - DNA, 20 bp, Artificial
  Synthetically generated peptide
ctctcgcctaccgctgccga

SEQ ID NO: 7829 - DNA, 20 bp, Artificial
  Synthetically generated peptide
tctcgcctaccgctgccgag

SEQ ID NO: 7830 - DNA, 20 bp, Artificial
  Synthetically generated peptide
ctcgcctaccgctgccgagg

SEQ ID NO: 7831 - DNA, 20 bp, Artificial
  Synthetically generated peptide
tcgcctaccgctgccgagga

SEQ ID NO: 7832 - DNA, 20 bp, Artificial
  Synthetically generated peptide
cgcctaccgctgccgaggaa

SEQ ID NO: 7833 - DNA, 20 bp, Artificial
  Synthetically generated peptide
gcctaccgctgccgaggaaa

SEQ ID NO: 7834 - DNA, 20 bp, Artificial
  Synthetically generated peptide
cctaccgctgccgaggaaac

SEQ ID NO: 7835 - DNA, 20 bp, Artificial
  Synthetically generated peptide
ctaccgctgccgaggaaact

SEQ ID NO: 7836 - DNA, 20 bp, Artificial
  Synthetically generated peptide
taccgctgccgaggaaactg

SEQ ID NO: 7837 - DNA, 20 bp, Artificial
  Synthetically generated peptide
accgctgccgaggaaactga

SEQ ID NO: 7838 - DNA, 20 bp, Artificial
  Synthetically generated peptide
ccgctgccgaggaaactgac

SEQ ID NO: 7839 - DNA, 20 bp, Artificial
  Synthetically generated peptide
cgctgccgaggaaactgacg

SEQ ID NO: 7840 - DNA, 20 bp, Artificial
  Synthetically generated peptide
gctgccgaggaaactgacgg

SEQ ID NO: 7841 - DNA, 20 bp, Artificial
  Synthetically generated peptide
ctgccgaggaaactgacgga

SEQ ID NO: 7842 - DNA, 20 bp, Artificial
  Synthetically generated peptide
tgtgcgagtgggatccgccg

SEQ ID NO: 7843 - DNA, 20 bp, Artificial
  Synthetically generated peptide
ctgtgcgagtgggatccgcc

SEQ ID NO: 7844 - DNA, 20 bp, Artificial
  Synthetically generated peptide
gctgtgcgagtgggatccgc

SEQ ID NO: 7845 - DNA, 20 bp, Artificial
  Synthetically generated peptide
tgctgtgcgagtgggatccg

SEQ ID NO: 7846 - DNA, 20 bp, Artificial
  Synthetically generated peptide
ctgctgtgcgagtgggatcc

SEQ ID NO: 7847 - DNA, 20 bp, Artificial
  Synthetically generated peptide
gctgctgtgcgagtgggatc

SEQ ID NO: 7848 - DNA, 20 bp, Artificial
  Synthetically generated peptide
cgctgctgtgcgagtgggat

SEQ ID NO: 7849 - DNA, 20 bp, Artificial
  Synthetically generated peptide
gcgctgctgtgcgagtggga

SEQ ID NO: 7850 - DNA, 20 bp, Artificial
  Synthetically generated peptide
tgcgctgctgtgcgagtggg

SEQ ID NO: 7851 - DNA, 20 bp, Artificial
  Synthetically generated peptide
gtgcgctgctgtgcgagtgg

SEQ ID NO: 7852 - DNA, 20 bp, Artificial
  Synthetically generated peptide
agtgcgctgctgtgcgagtg

SEQ ID NO: 7853 - DNA, 20 bp, Artificial
  Synthetically generated peptide
gagtgcgctgctgtgcgagt

SEQ ID NO: 7854 - DNA, 20 bp, Artificial
  Synthetically generated peptide
cgagtgcgctgctgtgcgag

SEQ ID NO: 7855 - DNA, 20 bp, Artificial
  Synthetically generated peptide
ccgagtgcgctgctgtgcga

SEQ ID NO: 7856 - DNA, 20 bp, Artificial
  Synthetically generated peptide
accgagtgcgctgctgtgcg

SEQ ID NO: 7857 - DNA, 20 bp, Artificial
  Synthetically generated peptide
caccgagtgcgctgctgtgc

SEQ ID NO: 7858 - DNA, 20 bp, Artificial
  Synthetically generated peptide
gcaccgagtgcgctgctgtg

SEQ ID NO: 7859 - DNA, 20 bp, Artificial
  Synthetically generated peptide
ggcaccgagtgcgctgctgt

SEQ ID NO: 7860 - DNA, 20 bp, Artificial
  Synthetically generated peptide
gggcaccgagtgcgctgctg

SEQ ID NO: 7861 - DNA, 20 bp, Artificial
  Synthetically generated peptide
ggggcaccgagtgcgctgct

SEQ ID NO: 7862 - DNA, 20 bp, Artificial
  Synthetically generated peptide
cggggcaccgagtgcgctgc

SEQ ID NO: 7863 - DNA, 20 bp, Artificial
  Synthetically generated peptide
gcggggcaccgagtgcgctg

SEQ ID NO: 7864 - DNA, 20 bp, Artificial
  Synthetically generated peptide
cgcggggcaccgagtgcgct

SEQ ID NO: 7865 - DNA, 20 bp, Artificial
  Synthetically generated peptide
gcgcggggcaccgagtgcgc

SEQ ID NO: 7866 - DNA, 20 bp, Artificial
  Synthetically generated peptide
tgcgcggggcaccgagtgcg

SEQ ID NO: 7867 - DNA, 20 bp, Artificial
  Synthetically generated peptide
ctgcgcggggcaccgagtgc

SEQ ID NO: 7868 - DNA, 20 bp, Artificial
  Synthetically generated peptide
cctgcgcggggcaccgagtg

SEQ ID NO: 7869 - DNA, 20 bp, Artificial
  Synthetically generated peptide
ccctgcgcggggcaccgagt

SEQ ID NO: 7870 - DNA, 20 bp, Artificial
  Synthetically generated peptide
accctgcgcggggcaccgag

SEQ ID NO: 7871 - DNA, 20 bp, Artificial
  Synthetically generated peptide
gaccctgcgcggggcaccga

SEQ ID NO: 7872 - DNA, 20 bp, Artificial
  Synthetically generated peptide
cgaccctgcgcggggcaccg

SEQ ID NO: 7873 - DNA, 20 bp, Artificial
  Synthetically generated peptide
gcgaccctgcgcggggcacc

SEQ ID NO: 7874 - DNA, 20 bp, Artificial
  Synthetically generated peptide
cgcgaccctgcgcggggcac

SEQ ID NO: 7875 - DNA, 27 bp, Artificial
  Synthetically generated peptide
cgcgccgccaccgccgccgtctcccgg

SEQ ID NO: 7876 - DNA, 20 bp, Artificial
  Synthetically generated peptide
gcgccgccaccgccgccgtc

SEQ ID NO: 7877 - DNA, 20 bp, Artificial
  Synthetically generated peptide
cgccgccaccgccgccgtct

SEQ ID NO: 7878 - DNA, 20 bp, Artificial
  Synthetically generated peptide
gccgccaccgccgccgtctc

SEQ ID NO: 7879 - DNA, 20 bp, Artificial
  Synthetically generated peptide
ccgccaccgccgccgtctcc

SEQ ID NO: 7880 - DNA, 20 bp, Artificial
  Synthetically generated peptide
cgccaccgccgccgtctccc

SEQ ID NO: 7881 - DNA, 20 bp, Artificial
  Synthetically generated peptide
gccaccgccgccgtctcccg

SEQ ID NO: 7882 - DNA, 20 bp, Artificial
  Synthetically generated peptide
ccaccgccgccgtctcccgg

SEQ ID NO: 7883 - DNA, 20 bp, Artificial
  Synthetically generated peptide
caccgccgccgtctcccggg

SEQ ID NO: 7884 - DNA, 20 bp, Artificial
  Synthetically generated peptide
accgccgccgtctcccgggg

SEQ ID NO: 7885 - DNA, 20 bp, Artificial
  Synthetically generated peptide
ccgccgccgtctcccggggc

SEQ ID NO: 7886 - DNA, 20 bp, Artificial
  Synthetically generated peptide
cgccgccgtctcccggggcc

SEQ ID NO: 7887 - DNA, 20 bp, Artificial
  Synthetically generated peptide
gccgccgtctcccggggccc

SEQ ID NO: 7888 - DNA, 20 bp, Artificial
  Synthetically generated peptide
ccgccgtctcccggggcccc

SEQ ID NO: 7889 - DNA, 20 bp, Artificial
  Synthetically generated peptide
cgccgtctcccggggccccc

SEQ ID NO: 7890 - DNA, 20 bp, Artificial
  Synthetically generated peptide
gccgtctcccggggcccccg

SEQ ID NO: 7891 - DNA, 20 bp, Artificial
  Synthetically generated peptide
ccgtctcccggggcccccgc

SEQ ID NO: 7892 - DNA, 20 bp, Artificial
  Synthetically generated peptide
cgtctcccggggcccccgcg

SEQ ID NO: 7893 - DNA, 20 bp, Artificial
  Synthetically generated peptide
gtctcccggggcccccgcgc

SEQ ID NO: 7894 - DNA, 20 bp, Artificial
  Synthetically generated peptide
tctcccggggcccccgcgca

SEQ ID NO: 7895 - DNA, 20 bp, Artificial
  Synthetically generated peptide
ctcccggggcccccgcgcac

SEQ ID NO: 7896 - DNA, 20 bp, Artificial
  Synthetically generated peptide
tcccggggcccccgcgcacg

SEQ ID NO: 7897 - DNA, 20 bp, Artificial
  Synthetically generated peptide
cccggggcccccgcgcacgc

SEQ ID NO: 7898 - DNA, 20 bp, Artificial
  Synthetically generated peptide
ccggggcccccgcgcacgct

SEQ ID NO: 7899 - DNA, 20 bp, Artificial
  Synthetically generated peptide
cggggcccccgcgcacgctc

SEQ ID NO: 7900 - DNA, 20 bp, Artificial
  Synthetically generated peptide
ggggcccccgcgcacgctcc

SEQ ID NO: 7901 - DNA, 20 bp, Artificial
  Synthetically generated peptide
gggcccccgcgcacgctcct

SEQ ID NO: 7902 - DNA, 20 bp, Artificial
  Synthetically generated peptide
ggcccccgcgcacgctcctc

SEQ ID NO: 7903 - DNA, 20 bp, Artificial
  Synthetically generated peptide
gcccccgcgcacgctcctcc

SEQ ID NO: 7904 - DNA, 20 bp, Artificial
  Synthetically generated peptide
cccccgcgcacgctcctccg

SEQ ID NO: 7905 - DNA, 20 bp, Artificial
  Synthetically generated peptide
ccccgcgcacgctcctccgc

SEQ ID NO: 7906 - DNA, 20 bp, Artificial
  Synthetically generated peptide
cccgcgcacgctcctccgcg

SEQ ID NO: 7907 - DNA, 20 bp, Artificial
  Synthetically generated peptide
ccgcgcacgctcctccgcgt

SEQ ID NO: 7908 - DNA, 20 bp, Artificial
  Synthetically generated peptide
cgcgcacgctcctccgcgtg

SEQ ID NO: 7909 - DNA, 20 bp, Artificial
  Synthetically generated peptide
gcgcacgctcctccgcgtgc

SEQ ID NO: 7910 - DNA, 20 bp, Artificial
  Synthetically generated peptide
cgcacgctcctccgcgtgct

SEQ ID NO: 7911 - DNA, 20 bp, Artificial
  Synthetically generated peptide
gcacgctcctccgcgtgctc

SEQ ID NO: 7912 - DNA, 20 bp, Artificial
  Synthetically generated peptide
cacgctcctccgcgtgctct

SEQ ID NO: 7913 - DNA, 20 bp, Artificial
  Synthetically generated peptide
acgctcctccgcgtgctctc

SEQ ID NO: 7914 - DNA, 20 bp, Artificial
  Synthetically generated peptide
cgctcctccgcgtgctctcg

SEQ ID NO: 7915 - DNA, 20 bp, Artificial
  Synthetically generated peptide
gctcctccgcgtgctctcgc

SEQ ID NO: 7916 - DNA, 20 bp, Artificial
  Synthetically generated peptide
ctcctccgcgtgctctcgcc

SEQ ID NO: 7917 - DNA, 20 bp, Artificial
  Synthetically generated peptide
tcctccgcgtgctctcgcct

SEQ ID NO: 7918 - DNA, 20 bp, Artificial
  Synthetically generated peptide
cctccgcgtgctctcgccta

SEQ ID NO: 7919 - DNA, 20 bp, Artificial
  Synthetically generated peptide
ctccgcgtgctctcgcctac

SEQ ID NO: 7920 - DNA, 20 bp, Artificial
  Synthetically generated peptide
tccgcgtgctctcgcctacc

SEQ ID NO: 7921 - DNA, 20 bp, Artificial
  Synthetically generated peptide
ccgcgtgctctcgcctaccg

SEQ ID NO: 7922 - DNA, 20 bp, Artificial
  Synthetically generated peptide
cgcgtgctctcgcctaccgc

SEQ ID NO: 7923 - DNA, 20 bp, Artificial
  Synthetically generated peptide
gcgtgctctcgcctaccgct

SEQ ID NO: 7924 - DNA, 20 bp, Artificial
  Synthetically generated peptide
cgtgctctcgcctaccgctg

SEQ ID NO: 7925 - DNA, 20 bp, Artificial
  Synthetically generated peptide
gtgctctcgcctaccgctgc

SEQ ID NO: 7926 - DNA, 20 bp, Artificial
  Synthetically generated peptide
tgctctcgcctaccgctgcc

SEQ ID NO: 7927 - DNA, 20 bp, Artificial
  Synthetically generated peptide
gctctcgcctaccgctgccg

SEQ ID NO: 7928 - DNA, 20 bp, Artificial
  Synthetically generated peptide
ctctcgcctaccgctgccga

SEQ ID NO: 7929 - DNA, 20 bp, Artificial
  Synthetically generated peptide
tctcgcctaccgctgccgag

SEQ ID NO: 7930 - DNA, 20 bp, Artificial
  Synthetically generated peptide
ctcgcctaccgctgccgagg

SEQ ID NO: 7931 - DNA, 20 bp, Artificial
  Synthetically generated peptide
tcgcctaccgctgccgagga

SEQ ID NO: 7932 - DNA, 20 bp, Artificial
  Synthetically generated peptide
cgcctaccgctgccgaggaa

SEQ ID NO: 7933 - DNA, 20 bp, Artificial
  Synthetically generated peptide
gcctaccgctgccgaggaaa

SEQ ID NO: 7934 - DNA, 20 bp, Artificial
  Synthetically generated peptide
cctaccgctgccgaggaaac

SEQ ID NO: 7935 - DNA, 20 bp, Artificial
  Synthetically generated peptide
ctaccgctgccgaggaaact

SEQ ID NO: 7936 - DNA, 20 bp, Artificial
  Synthetically generated peptide
taccgctgccgaggaaactg

SEQ ID NO: 7937 - DNA, 20 bp, Artificial
  Synthetically generated peptide
accgctgccgaggaaactga

SEQ ID NO: 7938 - DNA, 20 bp, Artificial
  Synthetically generated peptide
ccgctgccgaggaaactgac

SEQ ID NO: 7939 - DNA, 20 bp, Artificial
  Synthetically generated peptide
cgctgccgaggaaactgacg

SEQ ID NO: 7940 - DNA, 20 bp, Artificial
  Synthetically generated peptide
gctgccgaggaaactgacgg

SEQ ID NO: 7941 - DNA, 20 bp, Artificial
  Synthetically generated peptide
ctgccgaggaaactgacgga

SEQ ID NO: 7942 - DNA, 20 bp, Artificial
  Synthetically generated peptide
ccgcgccgccaccgccgccg

SEQ ID NO: 7943 - DNA, 20 bp, Artificial
  Synthetically generated peptide
cccgcgccgccaccgccgcc

SEQ ID NO: 7944 - DNA, 20 bp, Artificial
  Synthetically generated peptide
gcccgcgccgccaccgccgc

SEQ ID NO: 7945 - DNA, 20 bp, Artificial
  Synthetically generated peptide
tgcccgcgccgccaccgccg

SEQ ID NO: 7946 - DNA, 20 bp, Artificial
  Synthetically generated peptide
ctgcccgcgccgccaccgcc

SEQ ID NO: 7947 - DNA, 20 bp, Artificial
  Synthetically generated peptide
tctgcccgcgccgccaccgc

SEQ ID NO: 7948 - DNA, 20 bp, Artificial
  Synthetically generated peptide
ctctgcccgcgccgccaccg

SEQ ID NO: 7949 - DNA, 20 bp, Artificial
  Synthetically generated peptide
gctctgcccgcgccgccacc

SEQ ID NO: 7950 - DNA, 20 bp, Artificial
  Synthetically generated peptide
tgctctgcccgcgccgccac

SEQ ID NO: 7951 - DNA, 20 bp, Artificial
  Synthetically generated peptide
ttgctctgcccgcgccgcca

SEQ ID NO: 7952 - DNA, 20 bp, Artificial
  Synthetically generated peptide
cttgctctgcccgcgccgcc

SEQ ID NO: 7953 - DNA, 20 bp, Artificial
  Synthetically generated peptide
ccttgctctgcccgcgccgc

SEQ ID NO: 7954 - DNA, 20 bp, Artificial
  Synthetically generated peptide
tccttgctctgcccgcgccg

SEQ ID NO: 7955 - DNA, 20 bp, Artificial
  Synthetically generated peptide
gtccttgctctgcccgcgcc

SEQ ID NO: 7956 - DNA, 20 bp, Artificial
  Synthetically generated peptide
cgtccttgctctgcccgcgc

SEQ ID NO: 7957 - DNA, 20 bp, Artificial
  Synthetically generated peptide
gcgtccttgctctgcccgcg

SEQ ID NO: 7958 - DNA, 20 bp, Artificial
  Synthetically generated peptide
cgcgtccttgctctgcccgc

SEQ ID NO: 7959 - DNA, 20 bp, Artificial
  Synthetically generated peptide
ccgcgtccttgctctgcccg

SEQ ID NO: 7960 - DNA, 20 bp, Artificial
  Synthetically generated peptide
gccgcgtccttgctctgccc

SEQ ID NO: 7961 - DNA, 20 bp, Artificial
  Synthetically generated peptide
cgccgcgtccttgctctgcc

SEQ ID NO: 7962 - DNA, 20 bp, Artificial
  Synthetically generated peptide
ccgccgcgtccttgctctgc

SEQ ID NO: 7963 - DNA, 20 bp, Artificial
  Synthetically generated peptide
tccgccgcgtccttgctctg

SEQ ID NO: 7964 - DNA, 20 bp, Artificial
  Synthetically generated peptide
atccgccgcgtccttgctct

SEQ ID NO: 7965 - DNA, 20 bp, Artificial
  Synthetically generated peptide
gatccgccgcgtccttgctc

SEQ ID NO: 7966 - DNA, 20 bp, Artificial
  Synthetically generated peptide
ggatccgccgcgtccttgct

SEQ ID NO: 7967 - DNA, 20 bp, Artificial
  Synthetically generated peptide
gggatccgccgcgtccttgc

SEQ ID NO: 7968 - DNA, 20 bp, Artificial
  Synthetically generated peptide
tgggatccgccgcgtccttg

SEQ ID NO: 7969 - DNA, 20 bp, Artificial
  Synthetically generated peptide
gtgggatccgccgcgtcctt

SEQ ID NO: 7970 - DNA, 20 bp, Artificial
  Synthetically generated peptide
agtgggatccgccgcgtcct

SEQ ID NO: 7971 - DNA, 20 bp, Artificial
  Synthetically generated peptide
gagtgggatccgccgcgtcc

SEQ ID NO: 7972 - DNA, 20 bp, Artificial
  Synthetically generated peptide
cgagtgggatccgccgcgtc

SEQ ID NO: 7973 - DNA, 20 bp, Artificial
  Synthetically generated peptide
gcgagtgggatccgccgcgt

SEQ ID NO: 7974 - DNA, 20 bp, Artificial
  Synthetically generated peptide
tgcgagtgggatccgccgcg

SEQ ID NO: 7975 - DNA, 20 bp, Artificial
  Synthetically generated peptide
gtgcgagtgggatccgccgc

SEQ ID NO: 7976 - DNA, 20 bp, Artificial
  Synthetically generated peptide
tgtgcgagtgggatccgccg

SEQ ID NO: 7977 - DNA, 20 bp, Artificial
  Synthetically generated peptide
ctgtgcgagtgggatccgcc

SEQ ID NO: 7978 - DNA, 20 bp, Artificial
  Synthetically generated peptide
gctgtgcgagtgggatccgc

SEQ ID NO: 7979 - DNA, 20 bp, Artificial
  Synthetically generated peptide
tgctgtgcgagtgggatccg

SEQ ID NO: 7980 - DNA, 20 bp, Artificial
  Synthetically generated peptide
ctgctgtgcgagtgggatcc

SEQ ID NO: 7981 - DNA, 20 bp, Artificial
  Synthetically generated peptide
gctgctgtgcgagtgggatc

SEQ ID NO: 7982 - DNA, 20 bp, Artificial
  Synthetically generated peptide
cgctgctgtgcgagtgggat

SEQ ID NO: 7983 - DNA, 20 bp, Artificial
  Synthetically generated peptide
gcgctgctgtgcgagtggga

SEQ ID NO: 7984 - DNA, 20 bp, Artificial
  Synthetically generated peptide
tgcgctgctgtgcgagtggg

SEQ ID NO: 7985 - DNA, 20 bp, Artificial
  Synthetically generated peptide
gtgcgctgctgtgcgagtgg

SEQ ID NO: 7986 - DNA, 20 bp, Artificial
  Synthetically generated peptide
agtgcgctgctgtgcgagtg

SEQ ID NO: 7987 - DNA, 20 bp, Artificial
  Synthetically generated peptide
gagtgcgctgctgtgcgagt

SEQ ID NO: 7988 - DNA, 20 bp, Artificial
  Synthetically generated peptide
cgagtgcgctgctgtgcgag

SEQ ID NO: 7989 - DNA, 20 bp, Artificial
  Synthetically generated peptide
ccgagtgcgctgctgtgcga

SEQ ID NO: 7990 - DNA, 20 bp, Artificial
  Synthetically generated peptide
accgagtgcgctgctgtgcg

SEQ ID NO: 7991 - DNA, 20 bp, Artificial
  Synthetically generated peptide
caccgagtgcgctgctgtgc

SEQ ID NO: 7992 - DNA, 20 bp, Artificial
  Synthetically generated peptide
gcaccgagtgcgctgctgtg

SEQ ID NO: 7993 - DNA, 20 bp, Artificial
  Synthetically generated peptide
ggcaccgagtgcgctgctgt

SEQ ID NO: 7994 - DNA, 20 bp, Artificial
  Synthetically generated peptide
gggcaccgagtgcgctgctg

SEQ ID NO: 7995 - DNA, 20 bp, Artificial
  Synthetically generated peptide
ggggcaccgagtgcgctgct

SEQ ID NO: 7996 - DNA, 20 bp, Artificial
  Synthetically generated peptide
cggggcaccgagtgcgctgc

SEQ ID NO: 7997 - DNA, 20 bp, Artificial
  Synthetically generated peptide
gcggggcaccgagtgcgctg

SEQ ID NO: 7998 - DNA, 20 bp, Artificial
  Synthetically generated peptide
cgcggggcaccgagtgcgct

SEQ ID NO: 7999 - DNA, 20 bp, Artificial
  Synthetically generated peptide
gcgcggggcaccgagtgcgc

SEQ ID NO: 8000 - DNA, 20 bp, Artificial
  Synthetically generated peptide
tgcgcggggcaccgagtgcg

SEQ ID NO: 8001 - DNA, 20 bp, Artificial
  Synthetically generated peptide
ctgcgcggggcaccgagtgc

SEQ ID NO: 8002 - DNA, 20 bp, Artificial
  Synthetically generated peptide
cctgcgcggggcaccgagtg

SEQ ID NO: 8003 - DNA, 20 bp, Artificial
  Synthetically generated peptide
ccctgcgcggggcaccgagt

SEQ ID NO: 8004 - DNA, 20 bp, Artificial
  Synthetically generated peptide
accctgcgcggggcaccgag

SEQ ID NO: 8005 - DNA, 20 bp, Artificial
  Synthetically generated peptide
gaccctgcgcggggcaccga

SEQ ID NO: 8006 - DNA, 20 bp, Artificial
  Synthetically generated peptide
cgaccctgcgcggggcaccg

SEQ ID NO: 8007 - DNA, 20 bp, Artificial
  Synthetically generated peptide
gcgaccctgcgcggggcacc

SEQ ID NO: 8008 - DNA, 20 bp, Artificial
  Synthetically generated peptide
cgcgaccctgcgcggggcac

SEQ ID NO: 8009 - DNA, 26 bp, Artificial
  Synthetically generated peptide
cgcgcacgctcctccgcgtgctctcg

SEQ ID NO: 8010 - DNA, 20 bp, Artificial
  Synthetically generated peptide
gcgcacgctcctccgcgtgc

SEQ ID NO: 8011 - DNA, 20 bp, Artificial
  Synthetically generated peptide
cgcacgctcctccgcgtgct

SEQ ID NO: 8012 - DNA, 20 bp, Artificial
  Synthetically generated peptide
gcacgctcctccgcgtgctc

SEQ ID NO: 8013 - DNA, 20 bp, Artificial
  Synthetically generated peptide
cacgctcctccgcgtgctct

SEQ ID NO: 8014 - DNA, 20 bp, Artificial
  Synthetically generated peptide
acgctcctccgcgtgctctc

SEQ ID NO: 8015 - DNA, 20 bp, Artificial
  Synthetically generated peptide
cgctcctccgcgtgctctcg

SEQ ID NO: 8016 - DNA, 20 bp, Artificial
  Synthetically generated peptide
gctcctccgcgtgctctcgc

SEQ ID NO: 8017 - DNA, 20 bp, Artificial
  Synthetically generated peptide
ctcctccgcgtgctctcgcc

SEQ ID NO: 8018 - DNA, 20 bp, Artificial
  Synthetically generated peptide
tcctccgcgtgctctcgcct

SEQ ID NO: 8019 - DNA, 20 bp, Artificial
  Synthetically generated peptide
cctccgcgtgctctcgccta

SEQ ID NO: 8020 - DNA, 20 bp, Artificial
  Synthetically generated peptide
ctccgcgtgctctcgcctac

SEQ ID NO: 8021 - DNA, 20 bp, Artificial
  Synthetically generated peptide
tccgcgtgctctcgcctacc

SEQ ID NO: 8022 - DNA, 20 bp, Artificial
  Synthetically generated peptide
ccgcgtgctctcgcctaccg

SEQ ID NO: 8023 - DNA, 20 bp, Artificial
  Synthetically generated peptide
cgcgtgctctcgcctaccgc

SEQ ID NO: 8024 - DNA, 20 bp, Artificial
  Synthetically generated peptide
gcgtgctctcgcctaccgct

SEQ ID NO: 8025 - DNA, 20 bp, Artificial
  Synthetically generated peptide
cgtgctctcgcctaccgctg

SEQ ID NO: 8026 - DNA, 20 bp, Artificial
  Synthetically generated peptide
gtgctctcgcctaccgctgc

SEQ ID NO: 8027 - DNA, 20 bp, Artificial
  Synthetically generated peptide
tgctctcgcctaccgctgcc

SEQ ID NO: 8028 - DNA, 20 bp, Artificial
  Synthetically generated peptide
gctctcgcctaccgctgccg

SEQ ID NO: 8029 - DNA, 20 bp, Artificial
  Synthetically generated peptide
ctctcgcctaccgctgccga

SEQ ID NO: 8030 - DNA, 20 bp, Artificial
  Synthetically generated peptide
tctcgcctaccgctgccgag

SEQ ID NO: 8031 - DNA, 20 bp, Artificial
  Synthetically generated peptide
ctcgcctaccgctgccgagg

SEQ ID NO: 8032 - DNA, 20 bp, Artificial
  Synthetically generated peptide
tcgcctaccgctgccgagga

SEQ ID NO: 8033 - DNA, 20 bp, Artificial
  Synthetically generated peptide
cgcctaccgctgccgaggaa

SEQ ID NO: 8034 - DNA, 20 bp, Artificial
  Synthetically generated peptide
gcctaccgctgccgaggaaa

SEQ ID NO: 8035 - DNA, 20 bp, Artificial
  Synthetically generated peptide
cctaccgctgccgaggaaac

SEQ ID NO: 8036 - DNA, 20 bp, Artificial
  Synthetically generated peptide
ctaccgctgccgaggaaact

SEQ ID NO: 8037 - DNA, 20 bp, Artificial
  Synthetically generated peptide
taccgctgccgaggaaactg

SEQ ID NO: 8038 - DNA, 20 bp, Artificial
  Synthetically generated peptide
accgctgccgaggaaactga

SEQ ID NO: 8039 - DNA, 20 bp, Artificial
  Synthetically generated peptide
ccgctgccgaggaaactgac

SEQ ID NO: 8040 - DNA, 20 bp, Artificial
  Synthetically generated peptide
cgctgccgaggaaactgacg

SEQ ID NO: 8041 - DNA, 20 bp, Artificial
  Synthetically generated peptide
gctgccgaggaaactgacgg

SEQ ID NO: 8042 - DNA, 20 bp, Artificial
  Synthetically generated peptide
ctgccgaggaaactgacgga

SEQ ID NO: 8043 - DNA, 20 bp, Artificial
  Synthetically generated peptide
ccgcgcacgctcctccgcgt

SEQ ID NO: 8044 - DNA, 20 bp, Artificial
  Synthetically generated peptide
cccgcgcacgctcctccgcg

SEQ ID NO: 8045 - DNA, 20 bp, Artificial
  Synthetically generated peptide
ccccgcgcacgctcctccgc

SEQ ID NO: 8046 - DNA, 20 bp, Artificial
  Synthetically generated peptide
cccccgcgcacgctcctccg

SEQ ID NO: 8047 - DNA, 20 bp, Artificial
  Synthetically generated peptide
gcccccgcgcacgctcctcc

SEQ ID NO: 8048 - DNA, 20 bp, Artificial
  Synthetically generated peptide
ggcccccgcgcacgctcctc

SEQ ID NO: 8049 - DNA, 20 bp, Artificial
  Synthetically generated peptide
gggcccccgcgcacgctcct

SEQ ID NO: 8050 - DNA, 20 bp, Artificial
  Synthetically generated peptide
ggggcccccgcgcacgctcc

SEQ ID NO: 8051 - DNA, 20 bp, Artificial
  Synthetically generated peptide
cggggcccccgcgcacgctc

SEQ ID NO: 8052 - DNA, 20 bp, Artificial
  Synthetically generated peptide
ccggggcccccgcgcacgct

SEQ ID NO: 8053 - DNA, 20 bp, Artificial
  Synthetically generated peptide
cccggggcccccgcgcacgc

SEQ ID NO: 8054 - DNA, 20 bp, Artificial
  Synthetically generated peptide
tcccggggcccccgcgcacg

SEQ ID NO: 8055 - DNA, 20 bp, Artificial
  Synthetically generated peptide
ctcccggggcccccgcgcac

SEQ ID NO: 8056 - DNA, 20 bp, Artificial
  Synthetically generated peptide
tctcccggggcccccgcgca

SEQ ID NO: 8057 - DNA, 20 bp, Artificial
  Synthetically generated peptide
gtctcccggggcccccgcgc

SEQ ID NO: 8058 - DNA, 20 bp, Artificial
  Synthetically generated peptide
cgtctcccggggcccccgcg

SEQ ID NO: 8059 - DNA, 20 bp, Artificial
  Synthetically generated peptide
ccgtctcccggggcccccgc

SEQ ID NO: 8060 - DNA, 20 bp, Artificial
  Synthetically generated peptide
gccgtctcccggggcccccg

SEQ ID NO: 8061 - DNA, 20 bp, Artificial
  Synthetically generated peptide
cgccgtctcccggggccccc

SEQ ID NO: 8062 - DNA, 20 bp, Artificial
  Synthetically generated peptide
ccgccgtctcccggggcccc

SEQ ID NO: 8063 - DNA, 20 bp, Artificial
  Synthetically generated peptide
gccgccgtctcccggggccc

SEQ ID NO: 8064 - DNA, 20 bp, Artificial
  Synthetically generated peptide
cgccgccgtctcccggggcc

SEQ ID NO: 8065 - DNA, 20 bp, Artificial
  Synthetically generated peptide
ccgccgccgtctcccggggc

SEQ ID NO: 8066 - DNA, 20 bp, Artificial
  Synthetically generated peptide
accgccgccgtctcccgggg

SEQ ID NO: 8067 - DNA, 20 bp, Artificial
  Synthetically generated peptide
caccgccgccgtctcccggg

SEQ ID NO: 8068 - DNA, 20 bp, Artificial
  Synthetically generated peptide
ccaccgccgccgtctcccgg

SEQ ID NO: 8069 - DNA, 20 bp, Artificial
  Synthetically generated peptide
gccaccgccgccgtctcccg

SEQ ID NO: 8070 - DNA, 20 bp, Artificial
  Synthetically generated peptide
cgccaccgccgccgtctccc

SEQ ID NO: 8071 - DNA, 20 bp, Artificial
  Synthetically generated peptide
ccgccaccgccgccgtctcc

SEQ ID NO: 8072 - DNA, 20 bp, Artificial
  Synthetically generated peptide
gccgccaccgccgccgtctc

SEQ ID NO: 8073 - DNA, 20 bp, Artificial
  Synthetically generated peptide
cgccgccaccgccgccgtct

SEQ ID NO: 8074 - DNA, 20 bp, Artificial
  Synthetically generated peptide
gcgccgccaccgccgccgtc

SEQ ID NO: 8075 - DNA, 20 bp, Artificial
  Synthetically generated peptide
cgcgccgccaccgccgccgt

SEQ ID NO: 8076 - DNA, 20 bp, Artificial
  Synthetically generated peptide
ccgcgccgccaccgccgccg

SEQ ID NO: 8077 - DNA, 20 bp, Artificial
  Synthetically generated peptide
cccgcgccgccaccgccgcc

SEQ ID NO: 8078 - DNA, 20 bp, Artificial
  Synthetically generated peptide
gcccgcgccgccaccgccgc

SEQ ID NO: 8079 - DNA, 20 bp, Artificial
  Synthetically generated peptide
tgcccgcgccgccaccgccg

SEQ ID NO: 8080 - DNA, 20 bp, Artificial
  Synthetically generated peptide
ctgcccgcgccgccaccgcc

SEQ ID NO: 8081 - DNA, 20 bp, Artificial
  Synthetically generated peptide
tctgcccgcgccgccaccgc

SEQ ID NO: 8082 - DNA, 20 bp, Artificial
  Synthetically generated peptide
ctctgcccgcgccgccaccg

SEQ ID NO: 8083 - DNA, 20 bp, Artificial
  Synthetically generated peptide
gctctgcccgcgccgccacc

SEQ ID NO: 8084 - DNA, 20 bp, Artificial
  Synthetically generated peptide
tgctctgcccgcgccgccac

SEQ ID NO: 8085 - DNA, 20 bp, Artificial
  Synthetically generated peptide
ttgctctgcccgcgccgcca

SEQ ID NO: 8086 - DNA, 20 bp, Artificial
  Synthetically generated peptide
cttgctctgcccgcgccgcc

SEQ ID NO: 8087 - DNA, 20 bp, Artificial
  Synthetically generated peptide
ccttgctctgcccgcgccgc

SEQ ID NO: 8088 - DNA, 20 bp, Artificial
  Synthetically generated peptide
tccttgctctgcccgcgccg

SEQ ID NO: 8089 - DNA, 20 bp, Artificial
  Synthetically generated peptide
gtccttgctctgcccgcgcc

SEQ ID NO: 8090 - DNA, 20 bp, Artificial
  Synthetically generated peptide
cgtccttgctctgcccgcgc

SEQ ID NO: 8091 - DNA, 20 bp, Artificial
  Synthetically generated peptide
gcgtccttgctctgcccgcg

SEQ ID NO: 8092 - DNA, 20 bp, Artificial
  Synthetically generated peptide
cgcgtccttgctctgcccgc

SEQ ID NO: 8093 - DNA, 20 bp, Artificial
  Synthetically generated peptide
ccgcgtccttgctctgcccg

SEQ ID NO: 8094 - DNA, 20 bp, Artificial
  Synthetically generated peptide
gccgcgtccttgctctgccc

SEQ ID NO: 8095 - DNA, 20 bp, Artificial
  Synthetically generated peptide
cgccgcgtccttgctctgcc

SEQ ID NO: 8096 - DNA, 20 bp, Artificial
  Synthetically generated peptide
ccgccgcgtccttgctctgc

SEQ ID NO: 8097 - DNA, 20 bp, Artificial
  Synthetically generated peptide
tccgccgcgtccttgctctg

SEQ ID NO: 8098 - DNA, 20 bp, Artificial
  Synthetically generated peptide
atccgccgcgtccttgctct

SEQ ID NO: 8099 - DNA, 20 bp, Artificial
  Synthetically generated peptide
gatccgccgcgtccttgctc

SEQ ID NO: 8100 - DNA, 20 bp, Artificial
  Synthetically generated peptide
ggatccgccgcgtccttgct

SEQ ID NO: 8101 - DNA, 20 bp, Artificial
  Synthetically generated peptide
gggatccgccgcgtccttgc

SEQ ID NO: 8102 - DNA, 20 bp, Artificial
  Synthetically generated peptide
tgggatccgccgcgtccttg

SEQ ID NO: 8103 - DNA, 20 bp, Artificial
  Synthetically generated peptide
gtgggatccgccgcgtcctt

SEQ ID NO: 8104 - DNA, 20 bp, Artificial
  Synthetically generated peptide
agtgggatccgccgcgtcct

SEQ ID NO: 8105 - DNA, 20 bp, Artificial
  Synthetically generated peptide
gagtgggatccgccgcgtcc

SEQ ID NO: 8106 - DNA, 20 bp, Artificial
  Synthetically generated peptide
cgagtgggatccgccgcgtc

SEQ ID NO: 8107 - DNA, 20 bp, Artificial
  Synthetically generated peptide
gcgagtgggatccgccgcgt

SEQ ID NO: 8108 - DNA, 20 bp, Artificial
  Synthetically generated peptide
tgcgagtgggatccgccgcg

SEQ ID NO: 8109 - DNA, 20 bp, Artificial
  Synthetically generated peptide
gtgcgagtgggatccgccgc

SEQ ID NO: 8110 - DNA, 20 bp, Artificial
  Synthetically generated peptide
tgtgcgagtgggatccgccg

SEQ ID NO: 8111 - DNA, 20 bp, Artificial
  Synthetically generated peptide
ctgtgcgagtgggatccgcc

SEQ ID NO: 8112 - DNA, 20 bp, Artificial
  Synthetically generated peptide
gctgtgcgagtgggatccgc

SEQ ID NO: 8113 - DNA, 20 bp, Artificial
  Synthetically generated peptide
tgctgtgcgagtgggatccg

SEQ ID NO: 8114 - DNA, 20 bp, Artificial
  Synthetically generated peptide
ctgctgtgcgagtgggatcc

SEQ ID NO: 8115 - DNA, 20 bp, Artificial
  Synthetically generated peptide
gctgctgtgcgagtgggatc

SEQ ID NO: 8116 - DNA, 20 bp, Artificial
  Synthetically generated peptide
cgctgctgtgcgagtgggat

SEQ ID NO: 8117 - DNA, 20 bp, Artificial
  Synthetically generated peptide
gcgctgctgtgcgagtggga

SEQ ID NO: 8118 - DNA, 20 bp, Artificial
  Synthetically generated peptide
tgcgctgctgtgcgagtggg

SEQ ID NO: 8119 - DNA, 20 bp, Artificial
  Synthetically generated peptide
gtgcgctgctgtgcgagtgg

SEQ ID NO: 8120 - DNA, 20 bp, Artificial
  Synthetically generated peptide
agtgcgctgctgtgcgagtg

SEQ ID NO: 8121 - DNA, 20 bp, Artificial
  Synthetically generated peptide
gagtgcgctgctgtgcgagt

SEQ ID NO: 8122 - DNA, 20 bp, Artificial
  Synthetically generated peptide
cgagtgcgctgctgtgcgag

SEQ ID NO: 8123 - DNA, 20 bp, Artificial
  Synthetically generated peptide
ccgagtgcgctgctgtgcga

SEQ ID NO: 8124 - DNA, 20 bp, Artificial
  Synthetically generated peptide
accgagtgcgctgctgtgcg

SEQ ID NO: 8125 - DNA, 20 bp, Artificial
  Synthetically generated peptide
caccgagtgcgctgctgtgc

SEQ ID NO: 8126 - DNA, 20 bp, Artificial
  Synthetically generated peptide
gcaccgagtgcgctgctgtg

SEQ ID NO: 8127 - DNA, 20 bp, Artificial
  Synthetically generated peptide
ggcaccgagtgcgctgctgt

SEQ ID NO: 8128 - DNA, 20 bp, Artificial
  Synthetically generated peptide
gggcaccgagtgcgctgctg

SEQ ID NO: 8129 - DNA, 20 bp, Artificial
  Synthetically generated peptide
ggggcaccgagtgcgctgct

SEQ ID NO: 8130 - DNA, 20 bp, Artificial
  Synthetically generated peptide
cggggcaccgagtgcgctgc

SEQ ID NO: 8131 - DNA, 20 bp, Artificial
  Synthetically generated peptide
gcggggcaccgagtgcgctg

SEQ ID NO: 8132 - DNA, 20 bp, Artificial
  Synthetically generated peptide
cgcggggcaccgagtgcgct

SEQ ID NO: 8133 - DNA, 20 bp, Artificial
  Synthetically generated peptide
gcgcggggcaccgagtgcgc

SEQ ID NO: 8134 - DNA, 20 bp, Artificial
  Synthetically generated peptide
tgcgcggggcaccgagtgcg

SEQ ID NO: 8135 - DNA, 20 bp, Artificial
  Synthetically generated peptide
ctgcgcggggcaccgagtgc

SEQ ID NO: 8136 - DNA, 20 bp, Artificial
  Synthetically generated peptide
cctgcgcggggcaccgagtg

SEQ ID NO: 8137 - DNA, 20 bp, Artificial
  Synthetically generated peptide
ccctgcgcggggcaccgagt

SEQ ID NO: 8138 - DNA, 20 bp, Artificial
  Synthetically generated peptide
accctgcgcggggcaccgag

SEQ ID NO: 8139 - DNA, 20 bp, Artificial
  Synthetically generated peptide
gaccctgcgcggggcaccga

SEQ ID NO: 8140 - DNA, 20 bp, Artificial
  Synthetically generated peptide
cgaccctgcgcggggcaccg

SEQ ID NO: 8141 - DNA, 20 bp, Artificial
  Synthetically generated peptide
gcgaccctgcgcggggcacc

SEQ ID NO: 8142 - DNA, 20 bp, Artificial
  Synthetically generated peptide
cgcgaccctgcgcggggcac

SEQ ID NO: 8143 - DNA, 29 bp, Artificial
  Synthetically generated peptide
ccgaggaaactgacggagcccgagcgcgg

SEQ ID NO: 8144 - DNA, 20 bp, Artificial
  Synthetically generated peptide
cgaggaaactgacggagccc

SEQ ID NO: 8145 - DNA, 26 bp, Artificial
  Synthetically generated peptide
cgagtcagctgatccggcccaccccg

SEQ ID NO: 8146 - DNA, 20 bp, Artificial
  Synthetically generated peptide
gagtcagctgatccggccca

SEQ ID NO: 8147 - DNA, 20 bp, Artificial
  Synthetically generated peptide
agtcagctgatccggcccac

SEQ ID NO: 8148 - DNA, 20 bp, Artificial
  Synthetically generated peptide
gtcagctgatccggcccacc

SEQ ID NO: 8149 - DNA, 20 bp, Artificial
  Synthetically generated peptide
tcagctgatccggcccaccc

SEQ ID NO: 8150 - DNA, 20 bp, Artificial
  Synthetically generated peptide
cagctgatccggcccacccc

SEQ ID NO: 8151 - DNA, 20 bp, Artificial
  Synthetically generated peptide
agctgatccggcccaccccg

SEQ ID NO: 8152 - DNA, 20 bp, Artificial
  Synthetically generated peptide
gctgatccggcccaccccgc

SEQ ID NO: 8153 - DNA, 20 bp, Artificial
  Synthetically generated peptide
ctgatccggcccaccccgct

SEQ ID NO: 8154 - DNA, 20 bp, Artificial
  Synthetically generated peptide
tgatccggcccaccccgctc

SEQ ID NO: 8155 - DNA, 20 bp, Artificial
  Synthetically generated peptide
gatccggcccaccccgctcg

SEQ ID NO: 8156 - DNA, 20 bp, Artificial
  Synthetically generated peptide
atccggcccaccccgctcgg

SEQ ID NO: 8157 - DNA, 20 bp, Artificial
  Synthetically generated peptide
tccggcccaccccgctcggc

SEQ ID NO: 8158 - DNA, 20 bp, Artificial
  Synthetically generated peptide
ccggcccaccccgctcggca

SEQ ID NO: 8159 - DNA, 20 bp, Artificial
  Synthetically generated peptide
cggcccaccccgctcggcac

SEQ ID NO: 8160 - DNA, 20 bp, Artificial
  Synthetically generated peptide
ggcccaccccgctcggcacc

SEQ ID NO: 8161 - DNA, 20 bp, Artificial
  Synthetically generated peptide
gcccaccccgctcggcaccc

SEQ ID NO: 8162 - DNA, 20 bp, Artificial
  Synthetically generated peptide
cccaccccgctcggcacccg

SEQ ID NO: 8163 - DNA, 20 bp, Artificial
  Synthetically generated peptide
ccaccccgctcggcacccga

SEQ ID NO: 8164 - DNA, 20 bp, Artificial
  Synthetically generated peptide
caccccgctcggcacccgag

SEQ ID NO: 8165 - DNA, 20 bp, Artificial
  Synthetically generated peptide
accccgctcggcacccgaga

SEQ ID NO: 8166 - DNA, 20 bp, Artificial
  Synthetically generated peptide
ccccgctcggcacccgagag

SEQ ID NO: 8167 - DNA, 20 bp, Artificial
  Synthetically generated peptide
cccgctcggcacccgagaga

SEQ ID NO: 8168 - DNA, 20 bp, Artificial
  Synthetically generated peptide
ccgctcggcacccgagagag

SEQ ID NO: 8169 - DNA, 20 bp, Artificial
  Synthetically generated peptide
cgctcggcacccgagagaga

SEQ ID NO: 8170 - DNA, 20 bp, Artificial
  Synthetically generated peptide
gctcggcacccgagagagac

SEQ ID NO: 8171 - DNA, 20 bp, Artificial
  Synthetically generated peptide
ctcggcacccgagagagacc

SEQ ID NO: 8172 - DNA, 20 bp, Artificial
  Synthetically generated peptide
tcggcacccgagagagaccc

SEQ ID NO: 8173 - DNA, 20 bp, Artificial
  Synthetically generated peptide
cggcacccgagagagacccc

SEQ ID NO: 8174 - DNA, 20 bp, Artificial
  Synthetically generated peptide
ggcacccgagagagacccct

SEQ ID NO: 8175 - DNA, 20 bp, Artificial
  Synthetically generated peptide
gcacccgagagagaccccta

SEQ ID NO: 8176 - DNA, 20 bp, Artificial
  Synthetically generated peptide
cacccgagagagacccctag

SEQ ID NO: 8177 - DNA, 20 bp, Artificial
  Synthetically generated peptide
acccgagagagacccctagc

SEQ ID NO: 8178 - DNA, 20 bp, Artificial
  Synthetically generated peptide
cccgagagagacccctagcg

SEQ ID NO: 8179 - DNA, 20 bp, Artificial
  Synthetically generated peptide
ccgagagagacccctagcgg

SEQ ID NO: 8180 - DNA, 20 bp, Artificial
  Synthetically generated peptide
cgagagagacccctagcggc

SEQ ID NO: 8181 - DNA, 20 bp, Artificial
  Synthetically generated peptide
gagagagacccctagcggcg

SEQ ID NO: 8182 - DNA, 20 bp, Artificial
  Synthetically generated peptide
agagagacccctagcggcgc

SEQ ID NO: 8183 - DNA, 20 bp, Artificial
  Synthetically generated peptide
gagagacccctagcggcgcc

SEQ ID NO: 8184 - DNA, 20 bp, Artificial
  Synthetically generated peptide
agagacccctagcggcgccg

SEQ ID NO: 8185 - DNA, 20 bp, Artificial
  Synthetically generated peptide
gagacccctagcggcgccgc

SEQ ID NO: 8186 - DNA, 20 bp, Artificial
  Synthetically generated peptide
agacccctagcggcgccgcc

SEQ ID NO: 8187 - DNA, 20 bp, Artificial
  Synthetically generated peptide
gacccctagcggcgccgccg

SEQ ID NO: 8188 - DNA, 20 bp, Artificial
  Synthetically generated peptide
acccctagcggcgccgccgg

SEQ ID NO: 8189 - DNA, 20 bp, Artificial
  Synthetically generated peptide
cccctagcggcgccgccggg

SEQ ID NO: 8190 - DNA, 20 bp, Artificial
  Synthetically generated peptide
ccctagcggcgccgccgggg

SEQ ID NO: 8191 - DNA, 20 bp, Artificial
  Synthetically generated peptide
cctagcggcgccgccgggga

SEQ ID NO: 8192 - DNA, 20 bp, Artificial
  Synthetically generated peptide
ctagcggcgccgccggggaa

SEQ ID NO: 8193 - DNA, 20 bp, Artificial
  Synthetically generated peptide
tagcggcgccgccggggaac

SEQ ID NO: 8194 - DNA, 20 bp, Artificial
  Synthetically generated peptide
agcggcgccgccggggaact

SEQ ID NO: 8195 - DNA, 20 bp, Artificial
  Synthetically generated peptide
gcggcgccgccggggaactg

SEQ ID NO: 8196 - DNA, 20 bp, Artificial
  Synthetically generated peptide
cggcgccgccggggaactgc

SEQ ID NO: 8197 - DNA, 20 bp, Artificial
  Synthetically generated peptide
ggcgccgccggggaactgcg

SEQ ID NO: 8198 - DNA, 20 bp, Artificial
  Synthetically generated peptide
gcgccgccggggaactgcgc

SEQ ID NO: 8199 - DNA, 20 bp, Artificial
  Synthetically generated peptide
cgccgccggggaactgcgcc

SEQ ID NO: 8200 - DNA, 20 bp, Artificial
  Synthetically generated peptide
gccgccggggaactgcgccc

SEQ ID NO: 8201 - DNA, 20 bp, Artificial
  Synthetically generated peptide
ccgccggggaactgcgcccg

SEQ ID NO: 8202 - DNA, 20 bp, Artificial
  Synthetically generated peptide
cgccggggaactgcgcccgc

SEQ ID NO: 8203 - DNA, 20 bp, Artificial
  Synthetically generated peptide
gccggggaactgcgcccgct

SEQ ID NO: 8204 - DNA, 20 bp, Artificial
  Synthetically generated peptide
ccggggaactgcgcccgctc

SEQ ID NO: 8205 - DNA, 20 bp, Artificial
  Synthetically generated peptide
cggggaactgcgcccgctcg

SEQ ID NO: 8206 - DNA, 20 bp, Artificial
  Synthetically generated peptide
ggggaactgcgcccgctcgc

SEQ ID NO: 8207 - DNA, 20 bp, Artificial
  Synthetically generated peptide
gggaactgcgcccgctcgcg

SEQ ID NO: 8208 - DNA, 20 bp, Artificial
  Synthetically generated peptide
ggaactgcgcccgctcgcgc

SEQ ID NO: 8209 - DNA, 20 bp, Artificial
  Synthetically generated peptide
gaactgcgcccgctcgcgcc

SEQ ID NO: 8210 - DNA, 20 bp, Artificial
  Synthetically generated peptide
aactgcgcccgctcgcgccg

SEQ ID NO: 8211 - DNA, 20 bp, Artificial
  Synthetically generated peptide
actgcgcccgctcgcgccgg

SEQ ID NO: 8212 - DNA, 20 bp, Artificial
  Synthetically generated peptide
ctgcgcccgctcgcgccggg

SEQ ID NO: 8213 - DNA, 20 bp, Artificial
  Synthetically generated peptide
tgcgcccgctcgcgccggga

SEQ ID NO: 8214 - DNA, 20 bp, Artificial
  Synthetically generated peptide
gcgcccgctcgcgccgggag

SEQ ID NO: 8215 - DNA, 20 bp, Artificial
  Synthetically generated peptide
cgcccgctcgcgccgggagg

SEQ ID NO: 8216 - DNA, 20 bp, Artificial
  Synthetically generated peptide
gcccgctcgcgccgggaggg

SEQ ID NO: 8217 - DNA, 20 bp, Artificial
  Synthetically generated peptide
cccgctcgcgccgggagggg

SEQ ID NO: 8218 - DNA, 20 bp, Artificial
  Synthetically generated peptide
ccgctcgcgccgggaggggc

SEQ ID NO: 8219 - DNA, 20 bp, Artificial
  Synthetically generated peptide
cgctcgcgccgggaggggcc

SEQ ID NO: 8220 - DNA, 20 bp, Artificial
  Synthetically generated peptide
gctcgcgccgggaggggccc

SEQ ID NO: 8221 - DNA, 20 bp, Artificial
  Synthetically generated peptide
ctcgcgccgggaggggccct

SEQ ID NO: 8222 - DNA, 20 bp, Artificial
  Synthetically generated peptide
tcgcgccgggaggggccctc

SEQ ID NO: 8223 - DNA, 20 bp, Artificial
  Synthetically generated peptide
cgcgccgggaggggccctcg

SEQ ID NO: 8224 - DNA, 20 bp, Artificial
  Synthetically generated peptide
gcgccgggaggggccctcgc

SEQ ID NO: 8225 - DNA, 20 bp, Artificial
  Synthetically generated peptide
cgccgggaggggccctcgcg

SEQ ID NO: 8226 - DNA, 20 bp, Artificial
  Synthetically generated peptide
gccgggaggggccctcgcgc

SEQ ID NO: 8227 - DNA, 20 bp, Artificial
  Synthetically generated peptide
ccgggaggggccctcgcgcc

SEQ ID NO: 8228 - DNA, 20 bp, Artificial
  Synthetically generated peptide
cgggaggggccctcgcgccc

SEQ ID NO: 8229 - DNA, 20 bp, Artificial
  Synthetically generated peptide
gggaggggccctcgcgcccc

SEQ ID NO: 8230 - DNA, 20 bp, Artificial
  Synthetically generated peptide
ggaggggccctcgcgccccg

SEQ ID NO: 8231 - DNA, 20 bp, Artificial
  Synthetically generated peptide
gaggggccctcgcgccccgc

SEQ ID NO: 8232 - DNA, 20 bp, Artificial
  Synthetically generated peptide
aggggccctcgcgccccgcg

SEQ ID NO: 8233 - DNA, 20 bp, Artificial
  Synthetically generated peptide
ggggccctcgcgccccgcgc

SEQ ID NO: 8234 - DNA, 20 bp, Artificial
  Synthetically generated peptide
gggccctcgcgccccgcgcc

SEQ ID NO: 8235 - DNA, 20 bp, Artificial
  Synthetically generated peptide
ggccctcgcgccccgcgccc

SEQ ID NO: 8236 - DNA, 20 bp, Artificial
  Synthetically generated peptide
gccctcgcgccccgcgccca

SEQ ID NO: 8237 - DNA, 20 bp, Artificial
  Synthetically generated peptide
ccctcgcgccccgcgcccac

SEQ ID NO: 8238 - DNA, 20 bp, Artificial
  Synthetically generated peptide
cctcgcgccccgcgcccaca

SEQ ID NO: 8239 - DNA, 20 bp, Artificial
  Synthetically generated peptide
ctcgcgccccgcgcccacag

SEQ ID NO: 8240 - DNA, 20 bp, Artificial
  Synthetically generated peptide
tcgcgccccgcgcccacagg

SEQ ID NO: 8241 - DNA, 20 bp, Artificial
  Synthetically generated peptide
cgcgccccgcgcccacaggt

SEQ ID NO: 8242 - DNA, 20 bp, Artificial
  Synthetically generated peptide
gcgccccgcgcccacaggtg

SEQ ID NO: 8243 - DNA, 20 bp, Artificial
  Synthetically generated peptide
cgccccgcgcccacaggtgc

SEQ ID NO: 8244 - DNA, 20 bp, Artificial
  Synthetically generated peptide
gccccgcgcccacaggtgca

SEQ ID NO: 8245 - DNA, 20 bp, Artificial
  Synthetically generated peptide
ccccgcgcccacaggtgcac

SEQ ID NO: 8246 - DNA, 20 bp, Artificial
  Synthetically generated peptide
cccgcgcccacaggtgcacg

SEQ ID NO: 8247 - DNA, 20 bp, Artificial
  Synthetically generated peptide
ccgcgcccacaggtgcacgc

SEQ ID NO: 8248 - DNA, 20 bp, Artificial
  Synthetically generated peptide
cgcgcccacaggtgcacgcg

SEQ ID NO: 8249 - DNA, 20 bp, Artificial
  Synthetically generated peptide
gcgcccacaggtgcacgcgc

SEQ ID NO: 8250 - DNA, 20 bp, Artificial
  Synthetically generated peptide
cgcccacaggtgcacgcgcc

SEQ ID NO: 8251 - DNA, 20 bp, Artificial
  Synthetically generated peptide
gcccacaggtgcacgcgccc

SEQ ID NO: 8252 - DNA, 20 bp, Artificial
  Synthetically generated peptide
cccacaggtgcacgcgccct

SEQ ID NO: 8253 - DNA, 20 bp, Artificial
  Synthetically generated peptide
ccacaggtgcacgcgccctt

SEQ ID NO: 8254 - DNA, 20 bp, Artificial
  Synthetically generated peptide
cacaggtgcacgcgcccttg

SEQ ID NO: 8255 - DNA, 20 bp, Artificial
  Synthetically generated peptide
acaggtgcacgcgcccttgg

SEQ ID NO: 8256 - DNA, 20 bp, Artificial
  Synthetically generated peptide
caggtgcacgcgcccttggc

SEQ ID NO: 8257 - DNA, 20 bp, Artificial
  Synthetically generated peptide
aggtgcacgcgcccttggcg

SEQ ID NO: 8258 - DNA, 20 bp, Artificial
  Synthetically generated peptide
ggtgcacgcgcccttggcgc

SEQ ID NO: 8259 - DNA, 20 bp, Artificial
  Synthetically generated peptide
gtgcacgcgcccttggcgcc

SEQ ID NO: 8260 - DNA, 20 bp, Artificial
  Synthetically generated peptide
tgcacgcgcccttggcgccg

SEQ ID NO: 8261 - DNA, 20 bp, Artificial
  Synthetically generated peptide
gcacgcgcccttggcgccgc

SEQ ID NO: 8262 - DNA, 20 bp, Artificial
  Synthetically generated peptide
cacgcgcccttggcgccgcc

SEQ ID NO: 8263 - DNA, 20 bp, Artificial
  Synthetically generated peptide
acgcgcccttggcgccgcct

SEQ ID NO: 8264 - DNA, 20 bp, Artificial
  Synthetically generated peptide
cgcgcccttggcgccgcctg

SEQ ID NO: 8265 - DNA, 20 bp, Artificial
  Synthetically generated peptide
gcgcccttggcgccgcctgc

SEQ ID NO: 8266 - DNA, 20 bp, Artificial
  Synthetically generated peptide
cgcccttggcgccgcctgca

SEQ ID NO: 8267 - DNA, 20 bp, Artificial
  Synthetically generated peptide
gcccttggcgccgcctgcac

SEQ ID NO: 8268 - DNA, 20 bp, Artificial
  Synthetically generated peptide
cccttggcgccgcctgcacc

SEQ ID NO: 8269 - DNA, 20 bp, Artificial
  Synthetically generated peptide
ccttggcgccgcctgcaccc

SEQ ID NO: 8270 - DNA, 20 bp, Artificial
  Synthetically generated peptide
cttggcgccgcctgcacccc

SEQ ID NO: 8271 - DNA, 20 bp, Artificial
  Synthetically generated peptide
ttggcgccgcctgcacccca

SEQ ID NO: 8272 - DNA, 20 bp, Artificial
  Synthetically generated peptide
tggcgccgcctgcaccccac

SEQ ID NO: 8273 - DNA, 20 bp, Artificial
  Synthetically generated peptide
ggcgccgcctgcaccccacg

SEQ ID NO: 8274 - DNA, 20 bp, Artificial
  Synthetically generated peptide
gcgccgcctgcaccccacgc

SEQ ID NO: 8275 - DNA, 20 bp, Artificial
  Synthetically generated peptide
cgccgcctgcaccccacgcg

SEQ ID NO: 8276 - DNA, 20 bp, Artificial
  Synthetically generated peptide
gccgcctgcaccccacgcgc

SEQ ID NO: 8277 - DNA, 20 bp, Artificial
  Synthetically generated peptide
ccgcctgcaccccacgcgcc

SEQ ID NO: 8278 - DNA, 20 bp, Artificial
  Synthetically generated peptide
cgcctgcaccccacgcgccc

SEQ ID NO: 8279 - DNA, 20 bp, Artificial
  Synthetically generated peptide
gcctgcaccccacgcgcccc

SEQ ID NO: 8280 - DNA, 20 bp, Artificial
  Synthetically generated peptide
cctgcaccccacgcgccccc

SEQ ID NO: 8281 - DNA, 20 bp, Artificial
  Synthetically generated peptide
ctgcaccccacgcgccccct

SEQ ID NO: 8282 - DNA, 20 bp, Artificial
  Synthetically generated peptide
tgcaccccacgcgccccctc

SEQ ID NO: 8283 - DNA, 20 bp, Artificial
  Synthetically generated peptide
gcaccccacgcgccccctcc

SEQ ID NO: 8284 - DNA, 20 bp, Artificial
  Synthetically generated peptide
caccccacgcgccccctccg

SEQ ID NO: 8285 - DNA, 20 bp, Artificial
  Synthetically generated peptide
accccacgcgccccctccgc

SEQ ID NO: 8286 - DNA, 20 bp, Artificial
  Synthetically generated peptide
ccccacgcgccccctccgct

SEQ ID NO: 8287 - DNA, 20 bp, Artificial
  Synthetically generated peptide
cccacgcgccccctccgctc

SEQ ID NO: 8288 - DNA, 20 bp, Artificial
  Synthetically generated peptide
ccacgcgccccctccgctcc

SEQ ID NO: 8289 - DNA, 20 bp, Artificial
  Synthetically generated peptide
cacgcgccccctccgctccc

SEQ ID NO: 8290 - DNA, 20 bp, Artificial
  Synthetically generated peptide
acgcgccccctccgctcccc

SEQ ID NO: 8291 - DNA, 20 bp, Artificial
  Synthetically generated peptide
cgcgccccctccgctccccg

SEQ ID NO: 8292 - DNA, 20 bp, Artificial
  Synthetically generated peptide
gcgccccctccgctccccgg

SEQ ID NO: 8293 - DNA, 20 bp, Artificial
  Synthetically generated peptide
cgccccctccgctccccggc

SEQ ID NO: 8294 - DNA, 20 bp, Artificial
  Synthetically generated peptide
gccccctccgctccccggcc

SEQ ID NO: 8295 - DNA, 20 bp, Artificial
  Synthetically generated peptide
gcgagtcagctgatccggcc

SEQ ID NO: 8296 - DNA, 20 bp, Artificial
  Synthetically generated peptide
ggcgagtcagctgatccggc

SEQ ID NO: 8297 - DNA, 20 bp, Artificial
  Synthetically generated peptide
aggcgagtcagctgatccgg

SEQ ID NO: 8298 - DNA, 20 bp, Artificial
  Synthetically generated peptide
caggcgagtcagctgatccg

SEQ ID NO: 8299 - DNA, 20 bp, Artificial
  Synthetically generated peptide
ccaggcgagtcagctgatcc

SEQ ID NO: 8300 - DNA, 20 bp, Artificial
  Synthetically generated peptide
gccaggcgagtcagctgatc

SEQ ID NO: 8301 - DNA, 20 bp, Artificial
  Synthetically generated peptide
agccaggcgagtcagctgat

SEQ ID NO: 8302 - DNA, 20 bp, Artificial
  Synthetically generated peptide
gagccaggcgagtcagctga

SEQ ID NO: 8303 - DNA, 20 bp, Artificial
  Synthetically generated peptide
agagccaggcgagtcagctg

SEQ ID NO: 8304 - DNA, 20 bp, Artificial
  Synthetically generated peptide
cagagccaggcgagtcagct

SEQ ID NO: 8305 - DNA, 20 bp, Artificial
  Synthetically generated peptide
tcagagccaggcgagtcagc

SEQ ID NO: 8306 - DNA, 20 bp, Artificial
  Synthetically generated peptide
ctcagagccaggcgagtcag

SEQ ID NO: 8307 - DNA, 20 bp, Artificial
  Synthetically generated peptide
gctcagagccaggcgagtca

SEQ ID NO: 8308 - DNA, 20 bp, Artificial
  Synthetically generated peptide
ggctcagagccaggcgagtc

SEQ ID NO: 8309 - DNA, 20 bp, Artificial
  Synthetically generated peptide
gggctcagagccaggcgagt

SEQ ID NO: 8310 - DNA, 24 bp, Artificial
  Synthetically generated peptide
cgagagagacccctagcggcgccg

SEQ ID NO: 8311 - DNA, 20 bp, Artificial
  Synthetically generated peptide
gagagagacccctagcggcg

SEQ ID NO: 8312 - DNA, 20 bp, Artificial
  Synthetically generated peptide
agagagacccctagcggcgc

SEQ ID NO: 8313 - DNA, 20 bp, Artificial
  Synthetically generated peptide
gagagacccctagcggcgcc

SEQ ID NO: 8314 - DNA, 20 bp, Artificial
  Synthetically generated peptide
agagacccctagcggcgccg

SEQ ID NO: 8315 - DNA, 20 bp, Artificial
  Synthetically generated peptide
gagacccctagcggcgccgc

SEQ ID NO: 8316 - DNA, 20 bp, Artificial
  Synthetically generated peptide
agacccctagcggcgccgcc

SEQ ID NO: 8317 - DNA, 20 bp, Artificial
  Synthetically generated peptide
gacccctagcggcgccgccg

SEQ ID NO: 8318 - DNA, 20 bp, Artificial
  Synthetically generated peptide
acccctagcggcgccgccgg

SEQ ID NO: 8319 - DNA, 20 bp, Artificial
  Synthetically generated peptide
cccctagcggcgccgccggg

SEQ ID NO: 8320 - DNA, 20 bp, Artificial
  Synthetically generated peptide
ccctagcggcgccgccgggg

SEQ ID NO: 8321 - DNA, 20 bp, Artificial
  Synthetically generated peptide
cctagcggcgccgccgggga

SEQ ID NO: 8322 - DNA, 20 bp, Artificial
  Synthetically generated peptide
ctagcggcgccgccggggaa

SEQ ID NO: 8323 - DNA, 20 bp, Artificial
  Synthetically generated peptide
tagcggcgccgccggggaac

SEQ ID NO: 8324 - DNA, 20 bp, Artificial
  Synthetically generated peptide
agcggcgccgccggggaact

SEQ ID NO: 8325 - DNA, 20 bp, Artificial
  Synthetically generated peptide
gcggcgccgccggggaactg

SEQ ID NO: 8326 - DNA, 20 bp, Artificial
  Synthetically generated peptide
cggcgccgccggggaactgc

SEQ ID NO: 8327 - DNA, 20 bp, Artificial
  Synthetically generated peptide
ggcgccgccggggaactgcg

SEQ ID NO: 8328 - DNA, 20 bp, Artificial
  Synthetically generated peptide
gcgccgccggggaactgcgc

SEQ ID NO: 8329 - DNA, 20 bp, Artificial
  Synthetically generated peptide
cgccgccggggaactgcgcc

SEQ ID NO: 8330 - DNA, 20 bp, Artificial
  Synthetically generated peptide
gccgccggggaactgcgccc

SEQ ID NO: 8331 - DNA, 20 bp, Artificial
  Synthetically generated peptide
ccgccggggaactgcgcccg

SEQ ID NO: 8332 - DNA, 20 bp, Artificial
  Synthetically generated peptide
cgccggggaactgcgcccgc

SEQ ID NO: 8333 - DNA, 20 bp, Artificial
  Synthetically generated peptide
gccggggaactgcgcccgct

SEQ ID NO: 8334 - DNA, 20 bp, Artificial
  Synthetically generated peptide
ccggggaactgcgcccgctc

SEQ ID NO: 8335 - DNA, 20 bp, Artificial
  Synthetically generated peptide
cggggaactgcgcccgctcg

SEQ ID NO: 8336 - DNA, 20 bp, Artificial
  Synthetically generated peptide
ggggaactgcgcccgctcgc

SEQ ID NO: 8337 - DNA, 20 bp, Artificial
  Synthetically generated peptide
gggaactgcgcccgctcgcg

SEQ ID NO: 8338 - DNA, 20 bp, Artificial
  Synthetically generated peptide
ggaactgcgcccgctcgcgc

SEQ ID NO: 8339 - DNA, 20 bp, Artificial
  Synthetically generated peptide
gaactgcgcccgctcgcgcc

SEQ ID NO: 8340 - DNA, 20 bp, Artificial
  Synthetically generated peptide
aactgcgcccgctcgcgccg

SEQ ID NO: 8341 - DNA, 20 bp, Artificial
  Synthetically generated peptide
actgcgcccgctcgcgccgg

SEQ ID NO: 8342 - DNA, 20 bp, Artificial
  Synthetically generated peptide
ctgcgcccgctcgcgccggg

SEQ ID NO: 8343 - DNA, 20 bp, Artificial
  Synthetically generated peptide
tgcgcccgctcgcgccggga

SEQ ID NO: 8344 - DNA, 20 bp, Artificial
  Synthetically generated peptide
gcgcccgctcgcgccgggag

SEQ ID NO: 8345 - DNA, 20 bp, Artificial
  Synthetically generated peptide
cgcccgctcgcgccgggagg

SEQ ID NO: 8346 - DNA, 20 bp, Artificial
  Synthetically generated peptide
gcccgctcgcgccgggaggg

SEQ ID NO: 8347 - DNA, 20 bp, Artificial
  Synthetically generated peptide
cccgctcgcgccgggagggg

SEQ ID NO: 8348 - DNA, 20 bp, Artificial
  Synthetically generated peptide
ccgctcgcgccgggaggggc

SEQ ID NO: 8349 - DNA, 20 bp, Artificial
  Synthetically generated peptide
cgctcgcgccgggaggggcc

SEQ ID NO: 8350 - DNA, 20 bp, Artificial
  Synthetically generated peptide
gctcgcgccgggaggggccc

SEQ ID NO: 8351 - DNA, 20 bp, Artificial
  Synthetically generated peptide
ctcgcgccgggaggggccct

SEQ ID NO: 8352 - DNA, 20 bp, Artificial
  Synthetically generated peptide
tcgcgccgggaggggccctc

SEQ ID NO: 8353 - DNA, 20 bp, Artificial
  Synthetically generated peptide
cgcgccgggaggggccctcg

SEQ ID NO: 8354 - DNA, 20 bp, Artificial
  Synthetically generated peptide
gcgccgggaggggccctcgc

SEQ ID NO: 8355 - DNA, 20 bp, Artificial
  Synthetically generated peptide
cgccgggaggggccctcgcg

SEQ ID NO: 8356 - DNA, 20 bp, Artificial
  Synthetically generated peptide
gccgggaggggccctcgcgc

SEQ ID NO: 8357 - DNA, 20 bp, Artificial
  Synthetically generated peptide
ccgggaggggccctcgcgcc

SEQ ID NO: 8358 - DNA, 20 bp, Artificial
  Synthetically generated peptide
cgggaggggccctcgcgccc

SEQ ID NO: 8359 - DNA, 20 bp, Artificial
  Synthetically generated peptide
gggaggggccctcgcgcccc

SEQ ID NO: 8360 - DNA, 20 bp, Artificial
  Synthetically generated peptide
ggaggggccctcgcgccccg

SEQ ID NO: 8361 - DNA, 20 bp, Artificial
  Synthetically generated peptide
gaggggccctcgcgccccgc

SEQ ID NO: 8362 - DNA, 20 bp, Artificial
  Synthetically generated peptide
aggggccctcgcgccccgcg

SEQ ID NO: 8363 - DNA, 20 bp, Artificial
  Synthetically generated peptide
ggggccctcgcgccccgcgc

SEQ ID NO: 8364 - DNA, 20 bp, Artificial
  Synthetically generated peptide
gggccctcgcgccccgcgcc

SEQ ID NO: 8365 - DNA, 20 bp, Artificial
  Synthetically generated peptide
ggccctcgcgccccgcgccc

SEQ ID NO: 8366 - DNA, 20 bp, Artificial
  Synthetically generated peptide
gccctcgcgccccgcgccca

SEQ ID NO: 8367 - DNA, 20 bp, Artificial
  Synthetically generated peptide
ccctcgcgccccgcgcccac

SEQ ID NO: 8368 - DNA, 20 bp, Artificial
  Synthetically generated peptide
cctcgcgccccgcgcccaca

SEQ ID NO: 8369 - DNA, 20 bp, Artificial
  Synthetically generated peptide
ctcgcgccccgcgcccacag

SEQ ID NO: 8370 - DNA, 20 bp, Artificial
  Synthetically generated peptide
tcgcgccccgcgcccacagg

SEQ ID NO: 8371 - DNA, 20 bp, Artificial
  Synthetically generated peptide
cgcgccccgcgcccacaggt

SEQ ID NO: 8372 - DNA, 20 bp, Artificial
  Synthetically generated peptide
gcgccccgcgcccacaggtg

SEQ ID NO: 8373 - DNA, 20 bp, Artificial
  Synthetically generated peptide
cgccccgcgcccacaggtgc

SEQ ID NO: 8374 - DNA, 20 bp, Artificial
  Synthetically generated peptide
gccccgcgcccacaggtgca

SEQ ID NO: 8375 - DNA, 20 bp, Artificial
  Synthetically generated peptide
ccccgcgcccacaggtgcac

SEQ ID NO: 8376 - DNA, 20 bp, Artificial
  Synthetically generated peptide
cccgcgcccacaggtgcacg

SEQ ID NO: 8377 - DNA, 20 bp, Artificial
  Synthetically generated peptide
ccgcgcccacaggtgcacgc

SEQ ID NO: 8378 - DNA, 20 bp, Artificial
  Synthetically generated peptide
cgcgcccacaggtgcacgcg

SEQ ID NO: 8379 - DNA, 20 bp, Artificial
  Synthetically generated peptide
gcgcccacaggtgcacgcgc

SEQ ID NO: 8380 - DNA, 20 bp, Artificial
  Synthetically generated peptide
cgcccacaggtgcacgcgcc

SEQ ID NO: 8381 - DNA, 20 bp, Artificial
  Synthetically generated peptide
gcccacaggtgcacgcgccc

SEQ ID NO: 8382 - DNA, 20 bp, Artificial
  Synthetically generated peptide
cccacaggtgcacgcgccct

SEQ ID NO: 8383 - DNA, 20 bp, Artificial
  Synthetically generated peptide
ccacaggtgcacgcgccctt

SEQ ID NO: 8384 - DNA, 20 bp, Artificial
  Synthetically generated peptide
cacaggtgcacgcgcccttg

SEQ ID NO: 8385 - DNA, 20 bp, Artificial
  Synthetically generated peptide
acaggtgcacgcgcccttgg

SEQ ID NO: 8386 - DNA, 20 bp, Artificial
  Synthetically generated peptide
caggtgcacgcgcccttggc

SEQ ID NO: 8387 - DNA, 20 bp, Artificial
  Synthetically generated peptide
aggtgcacgcgcccttggcg

SEQ ID NO: 8388 - DNA, 20 bp, Artificial
  Synthetically generated peptide
ggtgcacgcgcccttggcgc

SEQ ID NO: 8389 - DNA, 20 bp, Artificial
  Synthetically generated peptide
gtgcacgcgcccttggcgcc

SEQ ID NO: 8390 - DNA, 20 bp, Artificial
  Synthetically generated peptide
tgcacgcgcccttggcgccg

SEQ ID NO: 8391 - DNA, 20 bp, Artificial
  Synthetically generated peptide
gcacgcgcccttggcgccgc

SEQ ID NO: 8392 - DNA, 20 bp, Artificial
  Synthetically generated peptide
cacgcgcccttggcgccgcc

SEQ ID NO: 8393 - DNA, 20 bp, Artificial
  Synthetically generated peptide
acgcgcccttggcgccgcct

SEQ ID NO: 8394 - DNA, 20 bp, Artificial
  Synthetically generated peptide
cgcgcccttggcgccgcctg

SEQ ID NO: 8395 - DNA, 20 bp, Artificial
  Synthetically generated peptide
gcgcccttggcgccgcctgc

SEQ ID NO: 8396 - DNA, 20 bp, Artificial
  Synthetically generated peptide
cgcccttggcgccgcctgca

SEQ ID NO: 8397 - DNA, 20 bp, Artificial
  Synthetically generated peptide
gcccttggcgccgcctgcac

SEQ ID NO: 8398 - DNA, 20 bp, Artificial
  Synthetically generated peptide
cccttggcgccgcctgcacc

SEQ ID NO: 8399 - DNA, 20 bp, Artificial
  Synthetically generated peptide
ccttggcgccgcctgcaccc

SEQ ID NO: 8400 - DNA, 20 bp, Artificial
  Synthetically generated peptide
cttggcgccgcctgcacccc

SEQ ID NO: 8401 - DNA, 20 bp, Artificial
  Synthetically generated peptide
ttggcgccgcctgcacccca

SEQ ID NO: 8402 - DNA, 20 bp, Artificial
  Synthetically generated peptide
tggcgccgcctgcaccccac

SEQ ID NO: 8403 - DNA, 20 bp, Artificial
  Synthetically generated peptide
ggcgccgcctgcaccccacg

SEQ ID NO: 8404 - DNA, 20 bp, Artificial
  Synthetically generated peptide
gcgccgcctgcaccccacgc

SEQ ID NO: 8405 - DNA, 20 bp, Artificial
  Synthetically generated peptide
cgccgcctgcaccccacgcg

SEQ ID NO: 8406 - DNA, 20 bp, Artificial
  Synthetically generated peptide
gccgcctgcaccccacgcgc

SEQ ID NO: 8407 - DNA, 20 bp, Artificial
  Synthetically generated peptide
ccgcctgcaccccacgcgcc

SEQ ID NO: 8408 - DNA, 20 bp, Artificial
  Synthetically generated peptide
cgcctgcaccccacgcgccc

SEQ ID NO: 8409 - DNA, 20 bp, Artificial
  Synthetically generated peptide
gcctgcaccccacgcgcccc

SEQ ID NO: 8410 - DNA, 20 bp, Artificial
  Synthetically generated peptide
cctgcaccccacgcgccccc

SEQ ID NO: 8411 - DNA, 20 bp, Artificial
  Synthetically generated peptide
ctgcaccccacgcgccccct

SEQ ID NO: 8412 - DNA, 20 bp, Artificial
  Synthetically generated peptide
tgcaccccacgcgccccctc

SEQ ID NO: 8413 - DNA, 20 bp, Artificial
  Synthetically generated peptide
gcaccccacgcgccccctcc

SEQ ID NO: 8414 - DNA, 20 bp, Artificial
  Synthetically generated peptide
caccccacgcgccccctccg

SEQ ID NO: 8415 - DNA, 20 bp, Artificial
  Synthetically generated peptide
accccacgcgccccctccgc

SEQ ID NO: 8416 - DNA, 20 bp, Artificial
  Synthetically generated peptide
ccccacgcgccccctccgct

SEQ ID NO: 8417 - DNA, 20 bp, Artificial
  Synthetically generated peptide
cccacgcgccccctccgctc

SEQ ID NO: 8418 - DNA, 20 bp, Artificial
  Synthetically generated peptide
ccacgcgccccctccgctcc

SEQ ID NO: 8419 - DNA, 20 bp, Artificial
  Synthetically generated peptide
cacgcgccccctccgctccc

SEQ ID NO: 8420 - DNA, 20 bp, Artificial
  Synthetically generated peptide
acgcgccccctccgctcccc

SEQ ID NO: 8421 - DNA, 20 bp, Artificial
  Synthetically generated peptide
cgcgccccctccgctccccg

SEQ ID NO: 8422 - DNA, 20 bp, Artificial
  Synthetically generated peptide
gcgccccctccgctccccgg

SEQ ID NO: 8423 - DNA, 20 bp, Artificial
  Synthetically generated peptide
cgccccctccgctccccggc

SEQ ID NO: 8424 - DNA, 20 bp, Artificial
  Synthetically generated peptide
gccccctccgctccccggcc

SEQ ID NO: 8425 - DNA, 20 bp, Artificial
  Synthetically generated peptide
ccgagagagacccctagcgg

SEQ ID NO: 8426 - DNA, 20 bp, Artificial
  Synthetically generated peptide
cccgagagagacccctagcg

SEQ ID NO: 8427 - DNA, 20 bp, Artificial
  Synthetically generated peptide
acccgagagagacccctagc

SEQ ID NO: 8428 - DNA, 20 bp, Artificial
  Synthetically generated peptide
cacccgagagagacccctag

SEQ ID NO: 8429 - DNA, 20 bp, Artificial
  Synthetically generated peptide
gcacccgagagagaccccta

SEQ ID NO: 8430 - DNA, 20 bp, Artificial
  Synthetically generated peptide
ggcacccgagagagacccct

SEQ ID NO: 8431 - DNA, 20 bp, Artificial
  Synthetically generated peptide
cggcacccgagagagacccc

SEQ ID NO: 8432 - DNA, 20 bp, Artificial
  Synthetically generated peptide
tcggcacccgagagagaccc

SEQ ID NO: 8433 - DNA, 20 bp, Artificial
  Synthetically generated peptide
ctcggcacccgagagagacc

SEQ ID NO: 8434 - DNA, 20 bp, Artificial
  Synthetically generated peptide
gctcggcacccgagagagac

SEQ ID NO: 8435 - DNA, 20 bp, Artificial
  Synthetically generated peptide
cgctcggcacccgagagaga

SEQ ID NO: 8436 - DNA, 20 bp, Artificial
  Synthetically generated peptide
ccgctcggcacccgagagag

SEQ ID NO: 8437 - DNA, 20 bp, Artificial
  Synthetically generated peptide
cccgctcggcacccgagaga

SEQ ID NO: 8438 - DNA, 20 bp, Artificial
  Synthetically generated peptide
ccccgctcggcacccgagag

SEQ ID NO: 8439 - DNA, 20 bp, Artificial
  Synthetically generated peptide
accccgctcggcacccgaga

SEQ ID NO: 8440 - DNA, 20 bp, Artificial
  Synthetically generated peptide
caccccgctcggcacccgag

SEQ ID NO: 8441 - DNA, 20 bp, Artificial
  Synthetically generated peptide
ccaccccgctcggcacccga

SEQ ID NO: 8442 - DNA, 20 bp, Artificial
  Synthetically generated peptide
cccaccccgctcggcacccg

SEQ ID NO: 8443 - DNA, 20 bp, Artificial
  Synthetically generated peptide
gcccaccccgctcggcaccc

SEQ ID NO: 8444 - DNA, 20 bp, Artificial
  Synthetically generated peptide
ggcccaccccgctcggcacc

SEQ ID NO: 8445 - DNA, 20 bp, Artificial
  Synthetically generated peptide
cggcccaccccgctcggcac

SEQ ID NO: 8446 - DNA, 20 bp, Artificial
  Synthetically generated peptide
ccggcccaccccgctcggca

SEQ ID NO: 8447 - DNA, 20 bp, Artificial
  Synthetically generated peptide
tccggcccaccccgctcggc

SEQ ID NO: 8448 - DNA, 20 bp, Artificial
  Synthetically generated peptide
atccggcccaccccgctcgg

SEQ ID NO: 8449 - DNA, 20 bp, Artificial
  Synthetically generated peptide
gatccggcccaccccgctcg

SEQ ID NO: 8450 - DNA, 20 bp, Artificial
  Synthetically generated peptide
tgatccggcccaccccgctc

SEQ ID NO: 8451 - DNA, 20 bp, Artificial
  Synthetically generated peptide
ctgatccggcccaccccgct

SEQ ID NO: 8452 - DNA, 20 bp, Artificial
  Synthetically generated peptide
gctgatccggcccaccccgc

SEQ ID NO: 8453 - DNA, 20 bp, Artificial
  Synthetically generated peptide
agctgatccggcccaccccg

SEQ ID NO: 8454 - DNA, 20 bp, Artificial
  Synthetically generated peptide
cagctgatccggcccacccc

SEQ ID NO: 8455 - DNA, 20 bp, Artificial
  Synthetically generated peptide
tcagctgatccggcccaccc

SEQ ID NO: 8456 - DNA, 20 bp, Artificial
  Synthetically generated peptide
gtcagctgatccggcccacc

SEQ ID NO: 8457 - DNA, 20 bp, Artificial
  Synthetically generated peptide
agtcagctgatccggcccac

SEQ ID NO: 8458 - DNA, 20 bp, Artificial
  Synthetically generated peptide
gagtcagctgatccggccca

SEQ ID NO: 8459 - DNA, 20 bp, Artificial
  Synthetically generated peptide
cgagtcagctgatccggccc

SEQ ID NO: 8460 - DNA, 20 bp, Artificial
  Synthetically generated peptide
gcgagtcagctgatccggcc

SEQ ID NO: 8461 - DNA, 20 bp, Artificial
  Synthetically generated peptide
ggcgagtcagctgatccggc

SEQ ID NO: 8462 - DNA, 20 bp, Artificial
  Synthetically generated peptide
aggcgagtcagctgatccgg

SEQ ID NO: 8463 - DNA, 20 bp, Artificial
  Synthetically generated peptide
caggcgagtcagctgatccg

SEQ ID NO: 8464 - DNA, 20 bp, Artificial
  Synthetically generated peptide
ccaggcgagtcagctgatcc

SEQ ID NO: 8465 - DNA, 20 bp, Artificial
  Synthetically generated peptide
gccaggcgagtcagctgatc

SEQ ID NO: 8466 - DNA, 20 bp, Artificial
  Synthetically generated peptide
agccaggcgagtcagctgat

SEQ ID NO: 8467 - DNA, 20 bp, Artificial
  Synthetically generated peptide
gagccaggcgagtcagctga

SEQ ID NO: 8468 - DNA, 20 bp, Artificial
  Synthetically generated peptide
agagccaggcgagtcagctg

SEQ ID NO: 8469 - DNA, 20 bp, Artificial
  Synthetically generated peptide
cagagccaggcgagtcagct

SEQ ID NO: 8470 - DNA, 20 bp, Artificial
  Synthetically generated peptide
tcagagccaggcgagtcagc

SEQ ID NO: 8471 - DNA, 20 bp, Artificial
  Synthetically generated peptide
ctcagagccaggcgagtcag

SEQ ID NO: 8472 - DNA, 20 bp, Artificial
  Synthetically generated peptide
gctcagagccaggcgagtca

SEQ ID NO: 8473 - DNA, 20 bp, Artificial
  Synthetically generated peptide
ggctcagagccaggcgagtc

SEQ ID NO: 8474 - DNA, 20 bp, Artificial
  Synthetically generated peptide
gggctcagagccaggcgagt

SEQ ID NO: 8475 - DNA, 28 bp, Artificial
  Synthetically generated peptide
cgcccgctcgcgccgggaggggccctcg

SEQ ID NO: 8476 - DNA, 20 bp, Artificial
  Synthetically generated peptide
gcccgctcgcgccgggaggg

SEQ ID NO: 8477 - DNA, 20 bp, Artificial
  Synthetically generated peptide
cccgctcgcgccgggagggg

SEQ ID NO: 8478 - DNA, 20 bp, Artificial
  Synthetically generated peptide
ccgctcgcgccgggaggggc

SEQ ID NO: 8479 - DNA, 20 bp, Artificial
  Synthetically generated peptide
cgctcgcgccgggaggggcc

SEQ ID NO: 8480 - DNA, 20 bp, Artificial
  Synthetically generated peptide
gctcgcgccgggaggggccc

SEQ ID NO: 8481 - DNA, 20 bp, Artificial
  Synthetically generated peptide
ctcgcgccgggaggggccct

SEQ ID NO: 8482 - DNA, 20 bp, Artificial
  Synthetically generated peptide
tcgcgccgggaggggccctc

SEQ ID NO: 8483 - DNA, 20 bp, Artificial
  Synthetically generated peptide
cgcgccgggaggggccctcg

SEQ ID NO: 8484 - DNA, 20 bp, Artificial
  Synthetically generated peptide
gcgccgggaggggccctcgc

SEQ ID NO: 8485 - DNA, 20 bp, Artificial
  Synthetically generated peptide
cgccgggaggggccctcgcg

SEQ ID NO: 8486 - DNA, 20 bp, Artificial
  Synthetically generated peptide
gccgggaggggccctcgcgc

SEQ ID NO: 8487 - DNA, 20 bp, Artificial
  Synthetically generated peptide
ccgggaggggccctcgcgcc

SEQ ID NO: 8488 - DNA, 20 bp, Artificial
  Synthetically generated peptide
cgggaggggccctcgcgccc

SEQ ID NO: 8489 - DNA, 20 bp, Artificial
  Synthetically generated peptide
gggaggggccctcgcgcccc

SEQ ID NO: 8490 - DNA, 20 bp, Artificial
  Synthetically generated peptide
ggaggggccctcgcgccccg

SEQ ID NO: 8491 - DNA, 20 bp, Artificial
  Synthetically generated peptide
gaggggccctcgcgccccgc

SEQ ID NO: 8492 - DNA, 20 bp, Artificial
  Synthetically generated peptide
aggggccctcgcgccccgcg

SEQ ID NO: 8493 - DNA, 20 bp, Artificial
  Synthetically generated peptide
ggggccctcgcgccccgcgc

SEQ ID NO: 8494 - DNA, 20 bp, Artificial
  Synthetically generated peptide
gggccctcgcgccccgcgcc

SEQ ID NO: 8495 - DNA, 20 bp, Artificial
  Synthetically generated peptide
ggccctcgcgccccgcgccc

SEQ ID NO: 8496 - DNA, 20 bp, Artificial
  Synthetically generated peptide
gccctcgcgccccgcgccca

SEQ ID NO: 8497 - DNA, 20 bp, Artificial
  Synthetically generated peptide
ccctcgcgccccgcgcccac

SEQ ID NO: 8498 - DNA, 20 bp, Artificial
  Synthetically generated peptide
cctcgcgccccgcgcccaca

SEQ ID NO: 8499 - DNA, 20 bp, Artificial
  Synthetically generated peptide
ctcgcgccccgcgcccacag

SEQ ID NO: 8500 - DNA, 20 bp, Artificial
  Synthetically generated peptide
tcgcgccccgcgcccacagg

SEQ ID NO: 8501 - DNA, 20 bp, Artificial
  Synthetically generated peptide
cgcgccccgcgcccacaggt

SEQ ID NO: 8502 - DNA, 20 bp, Artificial
  Synthetically generated peptide
gcgccccgcgcccacaggtg

SEQ ID NO: 8503 - DNA, 20 bp, Artificial
  Synthetically generated peptide
cgccccgcgcccacaggtgc

SEQ ID NO: 8504 - DNA, 20 bp, Artificial
  Synthetically generated peptide
gccccgcgcccacaggtgca

SEQ ID NO: 8505 - DNA, 20 bp, Artificial
  Synthetically generated peptide
ccccgcgcccacaggtgcac

SEQ ID NO: 8506 - DNA, 20 bp, Artificial
  Synthetically generated peptide
cccgcgcccacaggtgcacg

SEQ ID NO: 8507 - DNA, 20 bp, Artificial
  Synthetically generated peptide
ccgcgcccacaggtgcacgc

SEQ ID NO: 8508 - DNA, 20 bp, Artificial
  Synthetically generated peptide
cgcgcccacaggtgcacgcg

SEQ ID NO: 8509 - DNA, 20 bp, Artificial
  Synthetically generated peptide
gcgcccacaggtgcacgcgc

SEQ ID NO: 8510 - DNA, 20 bp, Artificial
  Synthetically generated peptide
cgcccacaggtgcacgcgcc

SEQ ID NO: 8511 - DNA, 20 bp, Artificial
  Synthetically generated peptide
gcccacaggtgcacgcgccc

SEQ ID NO: 8512 - DNA, 20 bp, Artificial
  Synthetically generated peptide
cccacaggtgcacgcgccct

SEQ ID NO: 8513 - DNA, 20 bp, Artificial
  Synthetically generated peptide
ccacaggtgcacgcgccctt

SEQ ID NO: 8514 - DNA, 20 bp, Artificial
  Synthetically generated peptide
cacaggtgcacgcgcccttg

SEQ ID NO: 8515 - DNA, 20 bp, Artificial
  Synthetically generated peptide
acaggtgcacgcgcccttgg

SEQ ID NO: 8516 - DNA, 20 bp, Artificial
  Synthetically generated peptide
caggtgcacgcgcccttggc

SEQ ID NO: 8517 - DNA, 20 bp, Artificial
  Synthetically generated peptide
aggtgcacgcgcccttggcg

SEQ ID NO: 8518 - DNA, 20 bp, Artificial
  Synthetically generated peptide
ggtgcacgcgcccttggcgc

SEQ ID NO: 8519 - DNA, 20 bp, Artificial
  Synthetically generated peptide
gtgcacgcgcccttggcgcc

SEQ ID NO: 8520 - DNA, 20 bp, Artificial
  Synthetically generated peptide
tgcacgcgcccttggcgccg

SEQ ID NO: 8521 - DNA, 20 bp, Artificial
  Synthetically generated peptide
gcacgcgcccttggcgccgc

SEQ ID NO: 8522 - DNA, 20 bp, Artificial
  Synthetically generated peptide
cacgcgcccttggcgccgcc

SEQ ID NO: 8523 - DNA, 20 bp, Artificial
  Synthetically generated peptide
acgcgcccttggcgccgcct

SEQ ID NO: 8524 - DNA, 20 bp, Artificial
  Synthetically generated peptide
cgcgcccttggcgccgcctg

SEQ ID NO: 8525 - DNA, 20 bp, Artificial
  Synthetically generated peptide
gcgcccttggcgccgcctgc

SEQ ID NO: 8526 - DNA, 20 bp, Artificial
  Synthetically generated peptide
cgcccttggcgccgcctgca

SEQ ID NO: 8527 - DNA, 20 bp, Artificial
  Synthetically generated peptide
gcccttggcgccgcctgcac

SEQ ID NO: 8528 - DNA, 20 bp, Artificial
  Synthetically generated peptide
cccttggcgccgcctgcacc

SEQ ID NO: 8529 - DNA, 20 bp, Artificial
  Synthetically generated peptide
ccttggcgccgcctgcaccc

SEQ ID NO: 8530 - DNA, 20 bp, Artificial
  Synthetically generated peptide
cttggcgccgcctgcacccc

SEQ ID NO: 8531 - DNA, 20 bp, Artificial
  Synthetically generated peptide
ttggcgccgcctgcacccca

SEQ ID NO: 8532 - DNA, 20 bp, Artificial
  Synthetically generated peptide
tggcgccgcctgcaccccac

SEQ ID NO: 8533 - DNA, 20 bp, Artificial
  Synthetically generated peptide
ggcgccgcctgcaccccacg

SEQ ID NO: 8534 - DNA, 20 bp, Artificial
  Synthetically generated peptide
gcgccgcctgcaccccacgc

SEQ ID NO: 8535 - DNA, 20 bp, Artificial
  Synthetically generated peptide
cgccgcctgcaccccacgcg

SEQ ID NO: 8536 - DNA, 20 bp, Artificial
  Synthetically generated peptide
gccgcctgcaccccacgcgc

SEQ ID NO: 8537 - DNA, 20 bp, Artificial
  Synthetically generated peptide
ccgcctgcaccccacgcgcc

SEQ ID NO: 8538 - DNA, 20 bp, Artificial
  Synthetically generated peptide
cgcctgcaccccacgcgccc

SEQ ID NO: 8539 - DNA, 20 bp, Artificial
  Synthetically generated peptide
gcctgcaccccacgcgcccc

SEQ ID NO: 8540 - DNA, 20 bp, Artificial
  Synthetically generated peptide
cctgcaccccacgcgccccc

SEQ ID NO: 8541 - DNA, 20 bp, Artificial
  Synthetically generated peptide
ctgcaccccacgcgccccct

SEQ ID NO: 8542 - DNA, 20 bp, Artificial
  Synthetically generated peptide
tgcaccccacgcgccccctc

SEQ ID NO: 8543 - DNA, 20 bp, Artificial
  Synthetically generated peptide
gcaccccacgcgccccctcc

SEQ ID NO: 8544 - DNA, 20 bp, Artificial
  Synthetically generated peptide
caccccacgcgccccctccg

SEQ ID NO: 8545 - DNA, 20 bp, Artificial
  Synthetically generated peptide
accccacgcgccccctccgc

SEQ ID NO: 8546 - DNA, 20 bp, Artificial
  Synthetically generated peptide
ccccacgcgccccctccgct

SEQ ID NO: 8547 - DNA, 20 bp, Artificial
  Synthetically generated peptide
cccacgcgccccctccgctc

SEQ ID NO: 8548 - DNA, 20 bp, Artificial
  Synthetically generated peptide
ccacgcgccccctccgctcc

SEQ ID NO: 8549 - DNA, 20 bp, Artificial
  Synthetically generated peptide
cacgcgccccctccgctccc

SEQ ID NO: 8550 - DNA, 20 bp, Artificial
  Synthetically generated peptide
acgcgccccctccgctcccc

SEQ ID NO: 8551 - DNA, 20 bp, Artificial
  Synthetically generated peptide
cgcgccccctccgctccccg

SEQ ID NO: 8552 - DNA, 20 bp, Artificial
  Synthetically generated peptide
gcgccccctccgctccccgg

SEQ ID NO: 8553 - DNA, 20 bp, Artificial
  Synthetically generated peptide
cgccccctccgctccccggc

SEQ ID NO: 8554 - DNA, 20 bp, Artificial
  Synthetically generated peptide
gccccctccgctccccggcc

SEQ ID NO: 8555 - DNA, 20 bp, Artificial
  Synthetically generated peptide
gcgcccgctcgcgccgggag

SEQ ID NO: 8556 - DNA, 20 bp, Artificial
  Synthetically generated peptide
tgcgcccgctcgcgccggga

SEQ ID NO: 8557 - DNA, 20 bp, Artificial
  Synthetically generated peptide
ctgcgcccgctcgcgccggg

SEQ ID NO: 8558 - DNA, 20 bp, Artificial
  Synthetically generated peptide
actgcgcccgctcgcgccgg

SEQ ID NO: 8559 - DNA, 20 bp, Artificial
  Synthetically generated peptide
aactgcgcccgctcgcgccg

SEQ ID NO: 8560 - DNA, 20 bp, Artificial
  Synthetically generated peptide
gaactgcgcccgctcgcgcc

SEQ ID NO: 8561 - DNA, 20 bp, Artificial
  Synthetically generated peptide
ggaactgcgcccgctcgcgc

SEQ ID NO: 8562 - DNA, 20 bp, Artificial
  Synthetically generated peptide
gggaactgcgcccgctcgcg

SEQ ID NO: 8563 - DNA, 20 bp, Artificial
  Synthetically generated peptide
ggggaactgcgcccgctcgc

SEQ ID NO: 8564 - DNA, 20 bp, Artificial
  Synthetically generated peptide
cggggaactgcgcccgctcg

SEQ ID NO: 8565 - DNA, 20 bp, Artificial
  Synthetically generated peptide
ccggggaactgcgcccgctc

SEQ ID NO: 8566 - DNA, 20 bp, Artificial
  Synthetically generated peptide
gccggggaactgcgcccgct

SEQ ID NO: 8567 - DNA, 20 bp, Artificial
  Synthetically generated peptide
cgccggggaactgcgcccgc

SEQ ID NO: 8568 - DNA, 20 bp, Artificial
  Synthetically generated peptide
ccgccggggaactgcgcccg

SEQ ID NO: 8569 - DNA, 20 bp, Artificial
  Synthetically generated peptide
gccgccggggaactgcgccc

SEQ ID NO: 8570 - DNA, 20 bp, Artificial
  Synthetically generated peptide
cgccgccggggaactgcgcc

SEQ ID NO: 8571 - DNA, 20 bp, Artificial
  Synthetically generated peptide
gcgccgccggggaactgcgc

SEQ ID NO: 8572 - DNA, 20 bp, Artificial
  Synthetically generated peptide
ggcgccgccggggaactgcg

SEQ ID NO: 8573 - DNA, 20 bp, Artificial
  Synthetically generated peptide
cggcgccgccggggaactgc

SEQ ID NO: 8574 - DNA, 20 bp, Artificial
  Synthetically generated peptide
gcggcgccgccggggaactg

SEQ ID NO: 8575 - DNA, 20 bp, Artificial
  Synthetically generated peptide
agcggcgccgccggggaact

SEQ ID NO: 8576 - DNA, 20 bp, Artificial
  Synthetically generated peptide
tagcggcgccgccggggaac

SEQ ID NO: 8577 - DNA, 20 bp, Artificial
  Synthetically generated peptide
ctagcggcgccgccggggaa

SEQ ID NO: 8578 - DNA, 20 bp, Artificial
  Synthetically generated peptide
cctagcggcgccgccgggga

SEQ ID NO: 8579 - DNA, 20 bp, Artificial
  Synthetically generated peptide
ccctagcggcgccgccgggg

SEQ ID NO: 8580 - DNA, 20 bp, Artificial
  Synthetically generated peptide
cccctagcggcgccgccggg

SEQ ID NO: 8581 - DNA, 20 bp, Artificial
  Synthetically generated peptide
acccctagcggcgccgccgg

SEQ ID NO: 8582 - DNA, 20 bp, Artificial
  Synthetically generated peptide
gacccctagcggcgccgccg

SEQ ID NO: 8583 - DNA, 20 bp, Artificial
  Synthetically generated peptide
agacccctagcggcgccgcc

SEQ ID NO: 8584 - DNA, 20 bp, Artificial
  Synthetically generated peptide
gagacccctagcggcgccgc

SEQ ID NO: 8585 - DNA, 20 bp, Artificial
  Synthetically generated peptide
agagacccctagcggcgccg

SEQ ID NO: 8586 - DNA, 20 bp, Artificial
  Synthetically generated peptide
gagagacccctagcggcgcc

SEQ ID NO: 8587 - DNA, 20 bp, Artificial
  Synthetically generated peptide
agagagacccctagcggcgc

SEQ ID NO: 8588 - DNA, 20 bp, Artificial
  Synthetically generated peptide
gagagagacccctagcggcg

SEQ ID NO: 8589 - DNA, 20 bp, Artificial
  Synthetically generated peptide
cgagagagacccctagcggc

SEQ ID NO: 8590 - DNA, 20 bp, Artificial
  Synthetically generated peptide
ccgagagagacccctagcgg

SEQ ID NO: 8591 - DNA, 20 bp, Artificial
  Synthetically generated peptide
cccgagagagacccctagcg

SEQ ID NO: 8592 - DNA, 20 bp, Artificial
  Synthetically generated peptide
acccgagagagacccctagc

SEQ ID NO: 8593 - DNA, 20 bp, Artificial
  Synthetically generated peptide
cacccgagagagacccctag

SEQ ID NO: 8594 - DNA, 20 bp, Artificial
  Synthetically generated peptide
gcacccgagagagaccccta

SEQ ID NO: 8595 - DNA, 20 bp, Artificial
  Synthetically generated peptide
ggcacccgagagagacccct

SEQ ID NO: 8596 - DNA, 20 bp, Artificial
  Synthetically generated peptide
cggcacccgagagagacccc

SEQ ID NO: 8597 - DNA, 20 bp, Artificial
  Synthetically generated peptide
tcggcacccgagagagaccc

SEQ ID NO: 8598 - DNA, 20 bp, Artificial
  Synthetically generated peptide
ctcggcacccgagagagacc

SEQ ID NO: 8599 - DNA, 20 bp, Artificial
  Synthetically generated peptide
gctcggcacccgagagagac

SEQ ID NO: 8600 - DNA, 20 bp, Artificial
  Synthetically generated peptide
cgctcggcacccgagagaga

SEQ ID NO: 8601 - DNA, 20 bp, Artificial
  Synthetically generated peptide
ccgctcggcacccgagagag

SEQ ID NO: 8602 - DNA, 20 bp, Artificial
  Synthetically generated peptide
cccgctcggcacccgagaga

SEQ ID NO: 8603 - DNA, 20 bp, Artificial
  Synthetically generated peptide
ccccgctcggcacccgagag

SEQ ID NO: 8604 - DNA, 20 bp, Artificial
  Synthetically generated peptide
accccgctcggcacccgaga

SEQ ID NO: 8605 - DNA, 20 bp, Artificial
  Synthetically generated peptide
caccccgctcggcacccgag

SEQ ID NO: 8606 - DNA, 20 bp, Artificial
  Synthetically generated peptide
ccaccccgctcggcacccga

SEQ ID NO: 8607 - DNA, 20 bp, Artificial
  Synthetically generated peptide
cccaccccgctcggcacccg

SEQ ID NO: 8608 - DNA, 20 bp, Artificial
  Synthetically generated peptide
gcccaccccgctcggcaccc

SEQ ID NO: 8609 - DNA, 20 bp, Artificial
  Synthetically generated peptide
ggcccaccccgctcggcacc

SEQ ID NO: 8610 - DNA, 20 bp, Artificial
  Synthetically generated peptide
cggcccaccccgctcggcac

SEQ ID NO: 8611 - DNA, 20 bp, Artificial
  Synthetically generated peptide
ccggcccaccccgctcggca

SEQ ID NO: 8612 - DNA, 20 bp, Artificial
  Synthetically generated peptide
tccggcccaccccgctcggc

SEQ ID NO: 8613 - DNA, 20 bp, Artificial
  Synthetically generated peptide
atccggcccaccccgctcgg

SEQ ID NO: 8614 - DNA, 20 bp, Artificial
  Synthetically generated peptide
gatccggcccaccccgctcg

SEQ ID NO: 8615 - DNA, 20 bp, Artificial
  Synthetically generated peptide
tgatccggcccaccccgctc

SEQ ID NO: 8616 - DNA, 20 bp, Artificial
  Synthetically generated peptide
ctgatccggcccaccccgct

SEQ ID NO: 8617 - DNA, 20 bp, Artificial
  Synthetically generated peptide
gctgatccggcccaccccgc

SEQ ID NO: 8618 - DNA, 20 bp, Artificial
  Synthetically generated peptide
agctgatccggcccaccccg

SEQ ID NO: 8619 - DNA, 20 bp, Artificial
  Synthetically generated peptide
cagctgatccggcccacccc

SEQ ID NO: 8620 - DNA, 20 bp, Artificial
  Synthetically generated peptide
tcagctgatccggcccaccc

SEQ ID NO: 8621 - DNA, 20 bp, Artificial
  Synthetically generated peptide
gtcagctgatccggcccacc

SEQ ID NO: 8622 - DNA, 20 bp, Artificial
  Synthetically generated peptide
agtcagctgatccggcccac

SEQ ID NO: 8623 - DNA, 20 bp, Artificial
  Synthetically generated peptide
gagtcagctgatccggccca

SEQ ID NO: 8624 - DNA, 20 bp, Artificial
  Synthetically generated peptide
cgagtcagctgatccggccc

SEQ ID NO: 8625 - DNA, 20 bp, Artificial
  Synthetically generated peptide
gcgagtcagctgatccggcc

SEQ ID NO: 8626 - DNA, 20 bp, Artificial
  Synthetically generated peptide
ggcgagtcagctgatccggc

SEQ ID NO: 8627 - DNA, 20 bp, Artificial
  Synthetically generated peptide
aggcgagtcagctgatccgg

SEQ ID NO: 8628 - DNA, 20 bp, Artificial
  Synthetically generated peptide
caggcgagtcagctgatccg

SEQ ID NO: 8629 - DNA, 20 bp, Artificial
  Synthetically generated peptide
ccaggcgagtcagctgatcc

SEQ ID NO: 8630 - DNA, 20 bp, Artificial
  Synthetically generated peptide
gccaggcgagtcagctgatc

SEQ ID NO: 8631 - DNA, 20 bp, Artificial
  Synthetically generated peptide
agccaggcgagtcagctgat

SEQ ID NO: 8632 - DNA, 20 bp, Artificial
  Synthetically generated peptide
gagccaggcgagtcagctga

SEQ ID NO: 8633 - DNA, 20 bp, Artificial
  Synthetically generated peptide
agagccaggcgagtcagctg

SEQ ID NO: 8634 - DNA, 20 bp, Artificial
  Synthetically generated peptide
cagagccaggcgagtcagct

SEQ ID NO: 8635 - DNA, 20 bp, Artificial
  Synthetically generated peptide
tcagagccaggcgagtcagc

SEQ ID NO: 8636 - DNA, 20 bp, Artificial
  Synthetically generated peptide
ctcagagccaggcgagtcag

SEQ ID NO: 8637 - DNA, 20 bp, Artificial
  Synthetically generated peptide
gctcagagccaggcgagtca

SEQ ID NO: 8638 - DNA, 20 bp, Artificial
  Synthetically generated peptide
ggctcagagccaggcgagtc

SEQ ID NO: 8639 - DNA, 20 bp, Artificial
  Synthetically generated peptide
gggctcagagccaggcgagt

SEQ ID NO: 8640 - DNA, 29 bp, Artificial
  Synthetically generated peptide
cgcgcccacaggtgcacgcgcccttggcg

SEQ ID NO: 8641 - DNA, 20 bp, Artificial
  Synthetically generated peptide
gcgcccacaggtgcacgcgc

SEQ ID NO: 8642 - DNA, 20 bp, Artificial
  Synthetically generated peptide
cgcccacaggtgcacgcgcc

SEQ ID NO: 8643 - DNA, 20 bp, Artificial
  Synthetically generated peptide
gcccacaggtgcacgcgccc

SEQ ID NO: 8644 - DNA, 20 bp, Artificial
  Synthetically generated peptide
cccacaggtgcacgcgccct

SEQ ID NO: 8645 - DNA, 20 bp, Artificial
  Synthetically generated peptide
ccacaggtgcacgcgccctt

SEQ ID NO: 8646 - DNA, 20 bp, Artificial
  Synthetically generated peptide
cacaggtgcacgcgcccttg

SEQ ID NO: 8647 - DNA, 20 bp, Artificial
  Synthetically generated peptide
acaggtgcacgcgcccttgg

SEQ ID NO: 8648 - DNA, 20 bp, Artificial
  Synthetically generated peptide
caggtgcacgcgcccttggc

SEQ ID NO: 8649 - DNA, 20 bp, Artificial
  Synthetically generated peptide
aggtgcacgcgcccttggcg

SEQ ID NO: 8650 - DNA, 20 bp, Artificial
  Synthetically generated peptide
ggtgcacgcgcccttggcgc

SEQ ID NO: 8651 - DNA, 20 bp, Artificial
  Synthetically generated peptide
gtgcacgcgcccttggcgcc

SEQ ID NO: 8652 - DNA, 20 bp, Artificial
  Synthetically generated peptide
tgcacgcgcccttggcgccg

SEQ ID NO: 8653 - DNA, 20 bp, Artificial
  Synthetically generated peptide
gcacgcgcccttggcgccgc

SEQ ID NO: 8654 - DNA, 20 bp, Artificial
  Synthetically generated peptide
cacgcgcccttggcgccgcc

SEQ ID NO: 8655 - DNA, 20 bp, Artificial
  Synthetically generated peptide
acgcgcccttggcgccgcct

SEQ ID NO: 8656 - DNA, 20 bp, Artificial
  Synthetically generated peptide
cgcgcccttggcgccgcctg

SEQ ID NO: 8657 - DNA, 20 bp, Artificial
  Synthetically generated peptide
gcgcccttggcgccgcctgc

SEQ ID NO: 8658 - DNA, 20 bp, Artificial
  Synthetically generated peptide
cgcccttggcgccgcctgca

SEQ ID NO: 8659 - DNA, 20 bp, Artificial
  Synthetically generated peptide
gcccttggcgccgcctgcac

SEQ ID NO: 8660 - DNA, 20 bp, Artificial
  Synthetically generated peptide
cccttggcgccgcctgcacc

SEQ ID NO: 8661 - DNA, 20 bp, Artificial
  Synthetically generated peptide
ccttggcgccgcctgcaccc

SEQ ID NO: 8662 - DNA, 20 bp, Artificial
  Synthetically generated peptide
cttggcgccgcctgcacccc

SEQ ID NO: 8663 - DNA, 20 bp, Artificial
  Synthetically generated peptide
ttggcgccgcctgcacccca

SEQ ID NO: 8664 - DNA, 20 bp, Artificial
  Synthetically generated peptide
tggcgccgcctgcaccccac

SEQ ID NO: 8665 - DNA, 20 bp, Artificial
  Synthetically generated peptide
ggcgccgcctgcaccccacg

SEQ ID NO: 8666 - DNA, 20 bp, Artificial
  Synthetically generated peptide
gcgccgcctgcaccccacgc

SEQ ID NO: 8667 - DNA, 20 bp, Artificial
  Synthetically generated peptide
cgccgcctgcaccccacgcg

SEQ ID NO: 8668 - DNA, 20 bp, Artificial
  Synthetically generated peptide
gccgcctgcaccccacgcgc

SEQ ID NO: 8669 - DNA, 20 bp, Artificial
  Synthetically generated peptide
ccgcctgcaccccacgcgcc

SEQ ID NO: 8670 - DNA, 20 bp, Artificial
  Synthetically generated peptide
cgcctgcaccccacgcgccc

SEQ ID NO: 8671 - DNA, 20 bp, Artificial
  Synthetically generated peptide
gcctgcaccccacgcgcccc

SEQ ID NO: 8672 - DNA, 20 bp, Artificial
  Synthetically generated peptide
cctgcaccccacgcgccccc

SEQ ID NO: 8673 - DNA, 20 bp, Artificial
  Synthetically generated peptide
ctgcaccccacgcgccccct

SEQ ID NO: 8674 - DNA, 20 bp, Artificial
  Synthetically generated peptide
tgcaccccacgcgccccctc

SEQ ID NO: 8675 - DNA, 20 bp, Artificial
  Synthetically generated peptide
gcaccccacgcgccccctcc

SEQ ID NO: 8676 - DNA, 20 bp, Artificial
  Synthetically generated peptide
caccccacgcgccccctccg

SEQ ID NO: 8677 - DNA, 20 bp, Artificial
  Synthetically generated peptide
accccacgcgccccctccgc

SEQ ID NO: 8678 - DNA, 20 bp, Artificial
  Synthetically generated peptide
ccccacgcgccccctccgct

SEQ ID NO: 8679 - DNA, 20 bp, Artificial
  Synthetically generated peptide
cccacgcgccccctccgctc

SEQ ID NO: 8680 - DNA, 20 bp, Artificial
  Synthetically generated peptide
ccacgcgccccctccgctcc

SEQ ID NO: 8681 - DNA, 20 bp, Artificial
  Synthetically generated peptide
cacgcgccccctccgctccc

SEQ ID NO: 8682 - DNA, 20 bp, Artificial
  Synthetically generated peptide
acgcgccccctccgctcccc

SEQ ID NO: 8683 - DNA, 20 bp, Artificial
  Synthetically generated peptide
cgcgccccctccgctccccg

SEQ ID NO: 8684 - DNA, 20 bp, Artificial
  Synthetically generated peptide
gcgccccctccgctccccgg

SEQ ID NO: 8685 - DNA, 20 bp, Artificial
  Synthetically generated peptide
cgccccctccgctccccggc

SEQ ID NO: 8686 - DNA, 20 bp, Artificial
  Synthetically generated peptide
gccccctccgctccccggcc

SEQ ID NO: 8687 - DNA, 20 bp, Artificial
  Synthetically generated peptide
ccgcgcccacaggtgcacgc

SEQ ID NO: 8688 - DNA, 20 bp, Artificial
  Synthetically generated peptide
cccgcgcccacaggtgcacg

SEQ ID NO: 8689 - DNA, 20 bp, Artificial
  Synthetically generated peptide
ccccgcgcccacaggtgcac

SEQ ID NO: 8690 - DNA, 20 bp, Artificial
  Synthetically generated peptide
gccccgcgcccacaggtgca

SEQ ID NO: 8691 - DNA, 20 bp, Artificial
  Synthetically generated peptide
cgccccgcgcccacaggtgc

SEQ ID NO: 8692 - DNA, 20 bp, Artificial
  Synthetically generated peptide
gcgccccgcgcccacaggtg

SEQ ID NO: 8693 - DNA, 20 bp, Artificial
  Synthetically generated peptide
cgcgccccgcgcccacaggt

SEQ ID NO: 8694 - DNA, 20 bp, Artificial
  Synthetically generated peptide
tcgcgccccgcgcccacagg

SEQ ID NO: 8695 - DNA, 20 bp, Artificial
  Synthetically generated peptide
ctcgcgccccgcgcccacag

SEQ ID NO: 8696 - DNA, 20 bp, Artificial
  Synthetically generated peptide
cctcgcgccccgcgcccaca

SEQ ID NO: 8697 - DNA, 20 bp, Artificial
  Synthetically generated peptide
ccctcgcgccccgcgcccac

SEQ ID NO: 8698 - DNA, 20 bp, Artificial
  Synthetically generated peptide
gccctcgcgccccgcgccca

SEQ ID NO: 8699 - DNA, 20 bp, Artificial
  Synthetically generated peptide
ggccctcgcgccccgcgccc

SEQ ID NO: 8700 - DNA, 20 bp, Artificial
  Synthetically generated peptide
gggccctcgcgccccgcgcc

SEQ ID NO: 8701 - DNA, 20 bp, Artificial
  Synthetically generated peptide
ggggccctcgcgccccgcgc

SEQ ID NO: 8702 - DNA, 20 bp, Artificial
  Synthetically generated peptide
aggggccctcgcgccccgcg

SEQ ID NO: 8703 - DNA, 20 bp, Artificial
  Synthetically generated peptide
gaggggccctcgcgccccgc

SEQ ID NO: 8704 - DNA, 20 bp, Artificial
  Synthetically generated peptide
ggaggggccctcgcgccccg

SEQ ID NO: 8705 - DNA, 20 bp, Artificial
  Synthetically generated peptide
gggaggggccctcgcgcccc

SEQ ID NO: 8706 - DNA, 20 bp, Artificial
  Synthetically generated peptide
cgggaggggccctcgcgccc

SEQ ID NO: 8707 - DNA, 20 bp, Artificial
  Synthetically generated peptide
ccgggaggggccctcgcgcc

SEQ ID NO: 8708 - DNA, 20 bp, Artificial
  Synthetically generated peptide
gccgggaggggccctcgcgc

SEQ ID NO: 8709 - DNA, 20 bp, Artificial
  Synthetically generated peptide
cgccgggaggggccctcgcg

SEQ ID NO: 8710 - DNA, 20 bp, Artificial
  Synthetically generated peptide
gcgccgggaggggccctcgc

SEQ ID NO: 8711 - DNA, 20 bp, Artificial
  Synthetically generated peptide
cgcgccgggaggggccctcg

SEQ ID NO: 8712 - DNA, 20 bp, Artificial
  Synthetically generated peptide
tcgcgccgggaggggccctc

SEQ ID NO: 8713 - DNA, 20 bp, Artificial
  Synthetically generated peptide
ctcgcgccgggaggggccct

SEQ ID NO: 8714 - DNA, 20 bp, Artificial
  Synthetically generated peptide
gctcgcgccgggaggggccc

SEQ ID NO: 8715 - DNA, 20 bp, Artificial
  Synthetically generated peptide
cgctcgcgccgggaggggcc

SEQ ID NO: 8716 - DNA, 20 bp, Artificial
  Synthetically generated peptide
ccgctcgcgccgggaggggc

SEQ ID NO: 8717 - DNA, 20 bp, Artificial
  Synthetically generated peptide
cccgctcgcgccgggagggg

SEQ ID NO: 8718 - DNA, 20 bp, Artificial
  Synthetically generated peptide
gcccgctcgcgccgggaggg

SEQ ID NO: 8719 - DNA, 20 bp, Artificial
  Synthetically generated peptide
cgcccgctcgcgccgggagg

SEQ ID NO: 8720 - DNA, 20 bp, Artificial
  Synthetically generated peptide
gcgcccgctcgcgccgggag

SEQ ID NO: 8721 - DNA, 20 bp, Artificial
  Synthetically generated peptide
tgcgcccgctcgcgccggga

SEQ ID NO: 8722 - DNA, 20 bp, Artificial
  Synthetically generated peptide
ctgcgcccgctcgcgccggg

SEQ ID NO: 8723 - DNA, 20 bp, Artificial
  Synthetically generated peptide
actgcgcccgctcgcgccgg

SEQ ID NO: 8724 - DNA, 20 bp, Artificial
  Synthetically generated peptide
aactgcgcccgctcgcgccg

SEQ ID NO: 8725 - DNA, 20 bp, Artificial
  Synthetically generated peptide
gaactgcgcccgctcgcgcc

SEQ ID NO: 8726 - DNA, 20 bp, Artificial
  Synthetically generated peptide
ggaactgcgcccgctcgcgc

SEQ ID NO: 8727 - DNA, 20 bp, Artificial
  Synthetically generated peptide
gggaactgcgcccgctcgcg

SEQ ID NO: 8728 - DNA, 20 bp, Artificial
  Synthetically generated peptide
ggggaactgcgcccgctcgc

SEQ ID NO: 8729 - DNA, 20 bp, Artificial
  Synthetically generated peptide
cggggaactgcgcccgctcg

SEQ ID NO: 8730 - DNA, 20 bp, Artificial
  Synthetically generated peptide
ccggggaactgcgcccgctc

SEQ ID NO: 8731 - DNA, 20 bp, Artificial
  Synthetically generated peptide
gccggggaactgcgcccgct

SEQ ID NO: 8732 - DNA, 20 bp, Artificial
  Synthetically generated peptide
cgccggggaactgcgcccgc

SEQ ID NO: 8733 - DNA, 20 bp, Artificial
  Synthetically generated peptide
ccgccggggaactgcgcccg

SEQ ID NO: 8734 - DNA, 20 bp, Artificial
  Synthetically generated peptide
gccgccggggaactgcgccc

SEQ ID NO: 8735 - DNA, 20 bp, Artificial
  Synthetically generated peptide
cgccgccggggaactgcgcc

SEQ ID NO: 8736 - DNA, 20 bp, Artificial
  Synthetically generated peptide
gcgccgccggggaactgcgc

SEQ ID NO: 8737 - DNA, 20 bp, Artificial
  Synthetically generated peptide
ggcgccgccggggaactgcg

SEQ ID NO: 8738 - DNA, 20 bp, Artificial
  Synthetically generated peptide
cggcgccgccggggaactgc

SEQ ID NO: 8739 - DNA, 20 bp, Artificial
  Synthetically generated peptide
gcggcgccgccggggaactg

SEQ ID NO: 8740 - DNA, 20 bp, Artificial
  Synthetically generated peptide
agcggcgccgccggggaact

SEQ ID NO: 8741 - DNA, 20 bp, Artificial
  Synthetically generated peptide
tagcggcgccgccggggaac

SEQ ID NO: 8742 - DNA, 20 bp, Artificial
  Synthetically generated peptide
ctagcggcgccgccggggaa

SEQ ID NO: 8743 - DNA, 20 bp, Artificial
  Synthetically generated peptide
cctagcggcgccgccgggga

SEQ ID NO: 8744 - DNA, 20 bp, Artificial
  Synthetically generated peptide
ccctagcggcgccgccgggg

SEQ ID NO: 8745 - DNA, 20 bp, Artificial
  Synthetically generated peptide
cccctagcggcgccgccggg

SEQ ID NO: 8746 - DNA, 20 bp, Artificial
  Synthetically generated peptide
acccctagcggcgccgccgg

SEQ ID NO: 8747 - DNA, 20 bp, Artificial
  Synthetically generated peptide
gacccctagcggcgccgccg

SEQ ID NO: 8748 - DNA, 20 bp, Artificial
  Synthetically generated peptide
agacccctagcggcgccgcc

SEQ ID NO: 8749 - DNA, 20 bp, Artificial
  Synthetically generated peptide
gagacccctagcggcgccgc

SEQ ID NO: 8750 - DNA, 20 bp, Artificial
  Synthetically generated peptide
agagacccctagcggcgccg

SEQ ID NO: 8751 - DNA, 20 bp, Artificial
  Synthetically generated peptide
gagagacccctagcggcgcc

SEQ ID NO: 8752 - DNA, 20 bp, Artificial
  Synthetically generated peptide
agagagacccctagcggcgc

SEQ ID NO: 8753 - DNA, 20 bp, Artificial
  Synthetically generated peptide
gagagagacccctagcggcg

SEQ ID NO: 8754 - DNA, 20 bp, Artificial
  Synthetically generated peptide
cgagagagacccctagcggc

SEQ ID NO: 8755 - DNA, 20 bp, Artificial
  Synthetically generated peptide
ccgagagagacccctagcgg

SEQ ID NO: 8756 - DNA, 20 bp, Artificial
  Synthetically generated peptide
cccgagagagacccctagcg

SEQ ID NO: 8757 - DNA, 20 bp, Artificial
  Synthetically generated peptide
acccgagagagacccctagc

SEQ ID NO: 8758 - DNA, 20 bp, Artificial
  Synthetically generated peptide
cacccgagagagacccctag

SEQ ID NO: 8759 - DNA, 20 bp, Artificial
  Synthetically generated peptide
gcacccgagagagaccccta

SEQ ID NO: 8760 - DNA, 20 bp, Artificial
  Synthetically generated peptide
ggcacccgagagagacccct

SEQ ID NO: 8761 - DNA, 20 bp, Artificial
  Synthetically generated peptide
cggcacccgagagagacccc

SEQ ID NO: 8762 - DNA, 20 bp, Artificial
  Synthetically generated peptide
tcggcacccgagagagaccc

SEQ ID NO: 8763 - DNA, 20 bp, Artificial
  Synthetically generated peptide
ctcggcacccgagagagacc

SEQ ID NO: 8764 - DNA, 20 bp, Artificial
  Synthetically generated peptide
gctcggcacccgagagagac

SEQ ID NO: 8765 - DNA, 20 bp, Artificial
  Synthetically generated peptide
cgctcggcacccgagagaga

SEQ ID NO: 8766 - DNA, 20 bp, Artificial
  Synthetically generated peptide
ccgctcggcacccgagagag

SEQ ID NO: 8767 - DNA, 20 bp, Artificial
  Synthetically generated peptide
cccgctcggcacccgagaga

SEQ ID NO: 8768 - DNA, 20 bp, Artificial
  Synthetically generated peptide
ccccgctcggcacccgagag

SEQ ID NO: 8769 - DNA, 20 bp, Artificial
  Synthetically generated peptide
accccgctcggcacccgaga

SEQ ID NO: 8770 - DNA, 20 bp, Artificial
  Synthetically generated peptide
caccccgctcggcacccgag

SEQ ID NO: 8771 - DNA, 20 bp, Artificial
  Synthetically generated peptide
ccaccccgctcggcacccga

SEQ ID NO: 8772 - DNA, 20 bp, Artificial
  Synthetically generated peptide
cccaccccgctcggcacccg

SEQ ID NO: 8773 - DNA, 20 bp, Artificial
  Synthetically generated peptide
gcccaccccgctcggcaccc

SEQ ID NO: 8774 - DNA, 20 bp, Artificial
  Synthetically generated peptide
ggcccaccccgctcggcacc

SEQ ID NO: 8775 - DNA, 20 bp, Artificial
  Synthetically generated peptide
cggcccaccccgctcggcac

SEQ ID NO: 8776 - DNA, 20 bp, Artificial
  Synthetically generated peptide
ccggcccaccccgctcggca

SEQ ID NO: 8777 - DNA, 20 bp, Artificial
  Synthetically generated peptide
tccggcccaccccgctcggc

SEQ ID NO: 8778 - DNA, 20 bp, Artificial
  Synthetically generated peptide
atccggcccaccccgctcgg

SEQ ID NO: 8779 - DNA, 20 bp, Artificial
  Synthetically generated peptide
gatccggcccaccccgctcg

SEQ ID NO: 8780 - DNA, 20 bp, Artificial
  Synthetically generated peptide
tgatccggcccaccccgctc

SEQ ID NO: 8781 - DNA, 20 bp, Artificial
  Synthetically generated peptide
ctgatccggcccaccccgct

SEQ ID NO: 8782 - DNA, 20 bp, Artificial
  Synthetically generated peptide
gctgatccggcccaccccgc

SEQ ID NO: 8783 - DNA, 20 bp, Artificial
  Synthetically generated peptide
agctgatccggcccaccccg

SEQ ID NO: 8784 - DNA, 20 bp, Artificial
  Synthetically generated peptide
cagctgatccggcccacccc

SEQ ID NO: 8785 - DNA, 20 bp, Artificial
  Synthetically generated peptide
tcagctgatccggcccaccc

SEQ ID NO: 8786 - DNA, 20 bp, Artificial
  Synthetically generated peptide
gtcagctgatccggcccacc

SEQ ID NO: 8787 - DNA, 20 bp, Artificial
  Synthetically generated peptide
agtcagctgatccggcccac

SEQ ID NO: 8788 - DNA, 20 bp, Artificial
  Synthetically generated peptide
gagtcagctgatccggccca

SEQ ID NO: 8789 - DNA, 20 bp, Artificial
  Synthetically generated peptide
cgagtcagctgatccggccc

SEQ ID NO: 8790 - DNA, 20 bp, Artificial
  Synthetically generated peptide
gcgagtcagctgatccggcc

SEQ ID NO: 8791 - DNA, 20 bp, Artificial
  Synthetically generated peptide
ggcgagtcagctgatccggc

SEQ ID NO: 8792 - DNA, 20 bp, Artificial
  Synthetically generated peptide
aggcgagtcagctgatccgg

SEQ ID NO: 8793 - DNA, 20 bp, Artificial
  Synthetically generated peptide
caggcgagtcagctgatccg

SEQ ID NO: 8794 - DNA, 20 bp, Artificial
  Synthetically generated peptide
ccaggcgagtcagctgatcc

SEQ ID NO: 8795 - DNA, 20 bp, Artificial
  Synthetically generated peptide
gccaggcgagtcagctgatc

SEQ ID NO: 8796 - DNA, 20 bp, Artificial
  Synthetically generated peptide
agccaggcgagtcagctgat

SEQ ID NO: 8797 - DNA, 20 bp, Artificial
  Synthetically generated peptide
gagccaggcgagtcagctga

SEQ ID NO: 8798 - DNA, 20 bp, Artificial
  Synthetically generated peptide
agagccaggcgagtcagctg

SEQ ID NO: 8799 - DNA, 20 bp, Artificial
  Synthetically generated peptide
cagagccaggcgagtcagct

SEQ ID NO: 8800 - DNA, 20 bp, Artificial
  Synthetically generated peptide
tcagagccaggcgagtcagc

SEQ ID NO: 8801 - DNA, 20 bp, Artificial
  Synthetically generated peptide
ctcagagccaggcgagtcag

SEQ ID NO: 8802 - DNA, 20 bp, Artificial
  Synthetically generated peptide
gctcagagccaggcgagtca

SEQ ID NO: 8803 - DNA, 20 bp, Artificial
  Synthetically generated peptide
ggctcagagccaggcgagtc

SEQ ID NO: 8804 - DNA, 20 bp, Artificial
  Synthetically generated peptide
gggctcagagccaggcgagt

SEQ ID NO: 8805 - DNA, 24 bp, Artificial
  Synthetically generated peptide
ggccgacggcccacctgggcttcg

SEQ ID NO: 8806 - DNA, 20 bp, Artificial
  Synthetically generated peptide
gccgacggcccacctgggct

SEQ ID NO: 8807 - DNA, 20 bp, Artificial
  Synthetically generated peptide
ccgacggcccacctgggctt

SEQ ID NO: 8808 - DNA, 20 bp, Artificial
  Synthetically generated peptide
cgacggcccacctgggcttc

SEQ ID NO: 8809 - DNA, 20 bp, Artificial
  Synthetically generated peptide
gacggcccacctgggcttcg

SEQ ID NO: 8810 - DNA, 20 bp, Artificial
  Synthetically generated peptide
acggcccacctgggcttcgt

SEQ ID NO: 8811 - DNA, 20 bp, Artificial
  Synthetically generated peptide
cggcccacctgggcttcgtg

SEQ ID NO: 8812 - DNA, 20 bp, Artificial
  Synthetically generated peptide
ggcccacctgggcttcgtga

SEQ ID NO: 8813 - DNA, 20 bp, Artificial
  Synthetically generated peptide
gcccacctgggcttcgtgaa

SEQ ID NO: 8814 - DNA, 20 bp, Artificial
  Synthetically generated peptide
cccacctgggcttcgtgaac

SEQ ID NO: 8815 - DNA, 20 bp, Artificial
  Synthetically generated peptide
ccacctgggcttcgtgaaca

SEQ ID NO: 8816 - DNA, 20 bp, Artificial
  Synthetically generated peptide
cacctgggcttcgtgaacag

SEQ ID NO: 8817 - DNA, 20 bp, Artificial
  Synthetically generated peptide
acctgggcttcgtgaacagt

SEQ ID NO: 8818 - DNA, 20 bp, Artificial
  Synthetically generated peptide
cctgggcttcgtgaacagtg

SEQ ID NO: 8819 - DNA, 20 bp, Artificial
  Synthetically generated peptide
ctgggcttcgtgaacagtgg

SEQ ID NO: 8820 - DNA, 20 bp, Artificial
  Synthetically generated peptide
tgggcttcgtgaacagtggg

SEQ ID NO: 8821 - DNA, 20 bp, Artificial
  Synthetically generated peptide
gggcttcgtgaacagtggga

SEQ ID NO: 8822 - DNA, 20 bp, Artificial
  Synthetically generated peptide
ggcttcgtgaacagtgggag

SEQ ID NO: 8823 - DNA, 20 bp, Artificial
  Synthetically generated peptide
gcttcgtgaacagtgggagg

SEQ ID NO: 8824 - DNA, 20 bp, Artificial
  Synthetically generated peptide
cttcgtgaacagtgggaggg

SEQ ID NO: 8825 - DNA, 26 bp, Artificial
  Synthetically generated peptide
cgctgaggctctagaaaagtcgagag

SEQ ID NO: 8826 - DNA, 20 bp, Artificial
  Synthetically generated peptide
acgctgaggctctagaaaag

SEQ ID NO: 8827 - DNA, 20 bp, Artificial
  Synthetically generated peptide
gacgctgaggctctagaaaa

SEQ ID NO: 8828 - DNA, 20 bp, Artificial
  Synthetically generated peptide
ggacgctgaggctctagaaa

SEQ ID NO: 8829 - DNA, 20 bp, Artificial
  Synthetically generated peptide
aggacgctgaggctctagaa

SEQ ID NO: 8830 - DNA, 20 bp, Artificial
  Synthetically generated peptide
taggacgctgaggctctaga

SEQ ID NO: 8831 - DNA, 20 bp, Artificial
  Synthetically generated peptide
ctaggacgctgaggctctag

SEQ ID NO: 8832 - DNA, 20 bp, Artificial
  Synthetically generated peptide
cctaggacgctgaggctcta

SEQ ID NO: 8833 - DNA, 20 bp, Artificial
  Synthetically generated peptide
tcctaggacgctgaggctct

SEQ ID NO: 8834 - DNA, 20 bp, Artificial
  Synthetically generated peptide
gtcctaggacgctgaggctc

SEQ ID NO: 8835 - DNA, 20 bp, Artificial
  Synthetically generated peptide
agtcctaggacgctgaggct

SEQ ID NO: 8836 - DNA, 20 bp, Artificial
  Synthetically generated peptide
gagtcctaggacgctgaggc

SEQ ID NO: 8837 - DNA, 20 bp, Artificial
  Synthetically generated peptide
tgagtcctaggacgctgagg

SEQ ID NO: 8838 - DNA, 20 bp, Artificial
  Synthetically generated peptide
gtgagtcctaggacgctgag

SEQ ID NO: 8839 - DNA, 20 bp, Artificial
  Synthetically generated peptide
ggtgagtcctaggacgctga

SEQ ID NO: 8840 - DNA, 20 bp, Artificial
  Synthetically generated peptide
aggtgagtcctaggacgctg

SEQ ID NO: 8841 - DNA, 20 bp, Artificial
  Synthetically generated peptide
aaggtgagtcctaggacgct

SEQ ID NO: 8842 - DNA, 20 bp, Artificial
  Synthetically generated peptide
aaaggtgagtcctaggacgc

SEQ ID NO: 8843 - DNA, 31 bp, Artificial
  Synthetically generated peptide
ctcgtccccgtgagcttgaatcatccgaccc

SEQ ID NO: 8844 - DNA, 20 bp, Artificial
  Synthetically generated peptide
tcgtccccgtgagcttgaat

SEQ ID NO: 8845 - DNA, 20 bp, Artificial
  Synthetically generated peptide
cgtccccgtgagcttgaatc

SEQ ID NO: 8846 - DNA, 20 bp, Artificial
  Synthetically generated peptide
gtccccgtgagcttgaatca

SEQ ID NO: 8847 - DNA, 20 bp, Artificial
  Synthetically generated peptide
tccccgtgagcttgaatcat

SEQ ID NO: 8848 - DNA, 20 bp, Artificial
  Synthetically generated peptide
ccccgtgagcttgaatcatc

SEQ ID NO: 8849 - DNA, 20 bp, Artificial
  Synthetically generated peptide
cccgtgagcttgaatcatcc

SEQ ID NO: 8850 - DNA, 20 bp, Artificial
  Synthetically generated peptide
ccgtgagcttgaatcatccg

SEQ ID NO: 8851 - DNA, 20 bp, Artificial
  Synthetically generated peptide
cgtgagcttgaatcatccga

SEQ ID NO: 8852 - DNA, 20 bp, Artificial
  Synthetically generated peptide
gtgagcttgaatcatccgac

SEQ ID NO: 8853 - DNA, 20 bp, Artificial
  Synthetically generated peptide
tgagcttgaatcatccgacc

SEQ ID NO: 8854 - DNA, 20 bp, Artificial
  Synthetically generated peptide
gagcttgaatcatccgaccc

SEQ ID NO: 8855 - DNA, 20 bp, Artificial
  Synthetically generated peptide
agcttgaatcatccgacccc

SEQ ID NO: 8856 - DNA, 20 bp, Artificial
  Synthetically generated peptide
gcttgaatcatccgaccccg

SEQ ID NO: 8857 - DNA, 20 bp, Artificial
  Synthetically generated peptide
cttgaatcatccgaccccgc

SEQ ID NO: 8858 - DNA, 20 bp, Artificial
  Synthetically generated peptide
ttgaatcatccgaccccgca

SEQ ID NO: 8859 - DNA, 20 bp, Artificial
  Synthetically generated peptide
tgaatcatccgaccccgcag

SEQ ID NO: 8860 - DNA, 20 bp, Artificial
  Synthetically generated peptide
gaatcatccgaccccgcagg

SEQ ID NO: 8861 - DNA, 20 bp, Artificial
  Synthetically generated peptide
aatcatccgaccccgcaggc

SEQ ID NO: 8862 - DNA, 20 bp, Artificial
  Synthetically generated peptide
atcatccgaccccgcaggcc

SEQ ID NO: 8863 - DNA, 20 bp, Artificial
  Synthetically generated peptide
tcatccgaccccgcaggcct

SEQ ID NO: 8864 - DNA, 20 bp, Artificial
  Synthetically generated peptide
catccgaccccgcaggcctc

SEQ ID NO: 8865 - DNA, 20 bp, Artificial
  Synthetically generated peptide
atccgaccccgcaggcctcc

SEQ ID NO: 8866 - DNA, 20 bp, Artificial
  Synthetically generated peptide
tccgaccccgcaggcctccc

SEQ ID NO: 8867 - DNA, 20 bp, Artificial
  Synthetically generated peptide
ccgaccccgcaggcctcccg

SEQ ID NO: 8868 - DNA, 20 bp, Artificial
  Synthetically generated peptide
cgaccccgcaggcctcccgg

SEQ ID NO: 8869 - DNA, 20 bp, Artificial
  Synthetically generated peptide
gaccccgcaggcctcccggg

SEQ ID NO: 8870 - DNA, 20 bp, Artificial
  Synthetically generated peptide
accccgcaggcctcccgggg

SEQ ID NO: 8871 - DNA, 20 bp, Artificial
  Synthetically generated peptide
ccccgcaggcctcccggggg

SEQ ID NO: 8872 - DNA, 20 bp, Artificial
  Synthetically generated peptide
cccgcaggcctcccgggggt

SEQ ID NO: 8873 - DNA, 20 bp, Artificial
  Synthetically generated peptide
ccgcaggcctcccgggggtg

SEQ ID NO: 8874 - DNA, 20 bp, Artificial
  Synthetically generated peptide
cgcaggcctcccgggggtgt

SEQ ID NO: 8875 - DNA, 20 bp, Artificial
  Synthetically generated peptide
gcaggcctcccgggggtgtc

SEQ ID NO: 8876 - DNA, 20 bp, Artificial
  Synthetically generated peptide
caggcctcccgggggtgtcg

SEQ ID NO: 8877 - DNA, 20 bp, Artificial
  Synthetically generated peptide
aggcctcccgggggtgtcgt

SEQ ID NO: 8878 - DNA, 20 bp, Artificial
  Synthetically generated peptide
ggcctcccgggggtgtcgta

SEQ ID NO: 8879 - DNA, 20 bp, Artificial
  Synthetically generated peptide
gcctcccgggggtgtcgtat

SEQ ID NO: 8880 - DNA, 20 bp, Artificial
  Synthetically generated peptide
cctcccgggggtgtcgtata

SEQ ID NO: 8881 - DNA, 20 bp, Artificial
  Synthetically generated peptide
ctcccgggggtgtcgtataa

SEQ ID NO: 8882 - DNA, 20 bp, Artificial
  Synthetically generated peptide
tcccgggggtgtcgtataaa

SEQ ID NO: 8883 - DNA, 20 bp, Artificial
  Synthetically generated peptide
cccgggggtgtcgtataaag

SEQ ID NO: 8884 - DNA, 20 bp, Artificial
  Synthetically generated peptide
ccgggggtgtcgtataaagg

SEQ ID NO: 8885 - DNA, 20 bp, Artificial
  Synthetically generated peptide
gctcgtccccgtgagcttga

SEQ ID NO: 8886 - DNA, 20 bp, Artificial
  Synthetically generated peptide
tgctcgtccccgtgagcttg

SEQ ID NO: 8887 - DNA, 20 bp, Artificial
  Synthetically generated peptide
ctgctcgtccccgtgagctt

SEQ ID NO: 8888 - DNA, 20 bp, Artificial
  Synthetically generated peptide
cctgctcgtccccgtgagct

SEQ ID NO: 8889 - DNA, 20 bp, Artificial
  Synthetically generated peptide
tcctgctcgtccccgtgagc

SEQ ID NO: 8890 - DNA, 20 bp, Artificial
  Synthetically generated peptide
ctcctgctcgtccccgtgag

SEQ ID NO: 8891 - DNA, 20 bp, Artificial
  Synthetically generated peptide
gctcctgctcgtccccgtga

SEQ ID NO: 8892 - DNA, 20 bp, Artificial
  Synthetically generated peptide
cgctcctgctcgtccccgtg

SEQ ID NO: 8893 - DNA, 20 bp, Artificial
  Synthetically generated peptide
gcgctcctgctcgtccccgt

SEQ ID NO: 8894 - DNA, 20 bp, Artificial
  Synthetically generated peptide
agcgctcctgctcgtccccg

SEQ ID NO: 8895 - DNA, 20 bp, Artificial
  Synthetically generated peptide
gagcgctcctgctcgtcccc

SEQ ID NO: 8896 - DNA, 20 bp, Artificial
  Synthetically generated peptide
agagcgctcctgctcgtccc

SEQ ID NO: 8897 - DNA, 20 bp, Artificial
  Synthetically generated peptide
gagagcgctcctgctcgtcc

SEQ ID NO: 8898 - DNA, 20 bp, Artificial
  Synthetically generated peptide
cgagagcgctcctgctcgtc

SEQ ID NO: 8899 - DNA, 20 bp, Artificial
  Synthetically generated peptide
tcgagagcgctcctgctcgt

SEQ ID NO: 8900 - DNA, 20 bp, Artificial
  Synthetically generated peptide
gtcgagagcgctcctgctcg

SEQ ID NO: 8901 - DNA, 20 bp, Artificial
  Synthetically generated peptide
agtcgagagcgctcctgctc

SEQ ID NO: 8902 - DNA, 20 bp, Artificial
  Synthetically generated peptide
aagtcgagagcgctcctgct

SEQ ID NO: 8903 - DNA, 20 bp, Artificial
  Synthetically generated peptide
aaagtcgagagcgctcctgc

SEQ ID NO: 8904 - DNA, 20 bp, Artificial
  Synthetically generated peptide
aaaagtcgagagcgctcctg

SEQ ID NO: 8905 - DNA, 20 bp, Artificial
  Synthetically generated peptide
gaaaagtcgagagcgctcct

SEQ ID NO: 8906 - DNA, 20 bp, Artificial
  Synthetically generated peptide
agaaaagtcgagagcgctcc

SEQ ID NO: 8907 - DNA, 20 bp, Artificial
  Synthetically generated peptide
tagaaaagtcgagagcgctc

SEQ ID NO: 8908 - DNA, 20 bp, Artificial
  Synthetically generated peptide
ctagaaaagtcgagagcgct

SEQ ID NO: 8909 - DNA, 20 bp, Artificial
  Synthetically generated peptide
tctagaaaagtcgagagcgc

SEQ ID NO: 8910 - DNA, 20 bp, Artificial
  Synthetically generated peptide
ctctagaaaagtcgagagcg

SEQ ID NO: 8911 - DNA, 20 bp, Artificial
  Synthetically generated peptide
gctctagaaaagtcgagagc

SEQ ID NO: 8912 - DNA, 27 bp, Artificial
  Synthetically generated peptide
aggcgtttctggaagagaatgagaacg

SEQ ID NO: 8913 - DNA, 20 bp, Artificial
  Synthetically generated peptide
ggcgtttctggaagagaatg

SEQ ID NO: 8914 - DNA, 20 bp, Artificial
  Synthetically generated peptide
gcgtttctggaagagaatga

SEQ ID NO: 8915 - DNA, 20 bp, Artificial
  Synthetically generated peptide
cgtttctggaagagaatgag

SEQ ID NO: 8916 - DNA, 20 bp, Artificial
  Synthetically generated peptide
caggcgtttctggaagagaa

SEQ ID NO: 8917 - DNA, 20 bp, Artificial
  Synthetically generated peptide
gcaggcgtttctggaagaga

SEQ ID NO: 8918 - DNA, 20 bp, Artificial
  Synthetically generated peptide
ggcaggcgtttctggaagag

SEQ ID NO: 8919 - DNA, 20 bp, Artificial
  Synthetically generated peptide
gggcaggcgtttctggaaga

SEQ ID NO: 8920 - DNA, 20 bp, Artificial
  Synthetically generated peptide
ggggcaggcgtttctggaag

SEQ ID NO: 8921 - DNA, 20 bp, Artificial
  Synthetically generated peptide
tggggcaggcgtttctggaa

SEQ ID NO: 8922 - DNA, 20 bp, Artificial
  Synthetically generated peptide
gtggggcaggcgtttctgga

SEQ ID NO: 8923 - DNA, 20 bp, Artificial
  Synthetically generated peptide
ggtggggcaggcgtttctgg

SEQ ID NO: 8924 - DNA, 20 bp, Artificial
  Synthetically generated peptide
aggtggggcaggcgtttctg

SEQ ID NO: 8925 - DNA, 20 bp, Artificial
  Synthetically generated peptide
gaggtggggcaggcgtttct

SEQ ID NO: 8926 - DNA, 20 bp, Artificial
  Synthetically generated peptide
agaggtggggcaggcgtttc

SEQ ID NO: 8927 - DNA, 26 bp, Artificial
  Synthetically generated peptide
cgtcaaaagcaggcacgagcaacctg

SEQ ID NO: 8928 - DNA, 23 bp, Artificial
  Synthetically generated peptide
gaacgaaccaaaggagcaaggcg

SEQ ID NO: 8929 - DNA, 25 bp, Artificial
  Synthetically generated peptide
cgctgacaagggtgcctaggcccgg

SEQ ID NO: 8930 - DNA, 20 bp, Artificial
  Synthetically generated peptide
gcgctgacaagggtgcctag

SEQ ID NO: 8931 - DNA, 20 bp, Artificial
  Synthetically generated peptide
tgcgctgacaagggtgccta

SEQ ID NO: 8932 - DNA, 20 bp, Artificial
  Synthetically generated peptide
ttgcgctgacaagggtgcct

SEQ ID NO: 8933 - DNA, 20 bp, Artificial
  Synthetically generated peptide
attgcgctgacaagggtgcc

SEQ ID NO: 8934 - DNA, 20 bp, Artificial
  Synthetically generated peptide
cattgcgctgacaagggtgc

SEQ ID NO: 8935 - DNA, 20 bp, Artificial
  Synthetically generated peptide
tcattgcgctgacaagggtg

SEQ ID NO: 8936 - DNA, 20 bp, Artificial
  Synthetically generated peptide
ctcattgcgctgacaagggt

SEQ ID NO: 8937 - DNA, 20 bp, Artificial
  Synthetically generated peptide
gctcattgcgctgacaaggg

SEQ ID NO: 8938 - DNA, 20 bp, Artificial
  Synthetically generated peptide
tgctcattgcgctgacaagg

SEQ ID NO: 8939 - DNA, 20 bp, Artificial
  Synthetically generated peptide
ttgctcattgcgctgacaag

SEQ ID NO: 8940 - DNA, 20 bp, Artificial
  Synthetically generated peptide
cttgctcattgcgctgacaa

SEQ ID NO: 8941 - DNA, 20 bp, Artificial
  Synthetically generated peptide
ccttgctcattgcgctgaca

SEQ ID NO: 8942 - DNA, 20 bp, Artificial
  Synthetically generated peptide
cccttgctcattgcgctgac

SEQ ID NO: 8943 - DNA, 20 bp, Artificial
  Synthetically generated peptide
tcccttgctcattgcgctga

SEQ ID NO: 8944 - DNA, 20 bp, Artificial
  Synthetically generated peptide
ctcccttgctcattgcgctg

SEQ ID NO: 8945 - DNA, 20 bp, Artificial
  Synthetically generated peptide
tctcccttgctcattgcgct

SEQ ID NO: 8946 - DNA, 20 bp, Artificial
  Synthetically generated peptide
ctctcccttgctcattgcgc

SEQ ID NO: 8947 - DNA, 20 bp, Artificial
  Synthetically generated peptide
tctctcccttgctcattgcg

SEQ ID NO: 8948 - DNA, 22 bp, Artificial
  Synthetically generated peptide
cgcaattccgtatttgttccgg

SEQ ID NO: 8949 - DNA, 20 bp, Artificial
  Synthetically generated peptide
gcaattccgtatttgttccg

SEQ ID NO: 8950 - DNA, 20 bp, Artificial
  Synthetically generated peptide
caattccgtatttgttccgg

SEQ ID NO: 8951 - DNA, 20 bp, Artificial
  Synthetically generated peptide
aattccgtatttgttccggg

SEQ ID NO: 8952 - DNA, 20 bp, Artificial
  Synthetically generated peptide
attccgtatttgttccgggt

SEQ ID NO: 8953 - DNA, 20 bp, Artificial
  Synthetically generated peptide
ttccgtatttgttccgggtc

SEQ ID NO: 8954 - DNA, 20 bp, Artificial
  Synthetically generated peptide
tccgtatttgttccgggtct

SEQ ID NO: 8955 - DNA, 20 bp, Artificial
  Synthetically generated peptide
ccgtatttgttccgggtctg

SEQ ID NO: 8956 - DNA, 20 bp, Artificial
  Synthetically generated peptide
cgtatttgttccgggtctgc

SEQ ID NO: 8957 - DNA, 20 bp, Artificial
  Synthetically generated peptide
gtatttgttccgggtctgca

SEQ ID NO: 8958 - DNA, 20 bp, Artificial
  Synthetically generated peptide
tatttgttccgggtctgcat

SEQ ID NO: 8959 - DNA, 20 bp, Artificial
  Synthetically generated peptide
atttgttccgggtctgcatg

SEQ ID NO: 8960 - DNA, 20 bp, Artificial
  Synthetically generated peptide
tttgttccgggtctgcatga

SEQ ID NO: 8961 - DNA, 20 bp, Artificial
  Synthetically generated peptide
ttgttccgggtctgcatgag

SEQ ID NO: 8962 - DNA, 20 bp, Artificial
  Synthetically generated peptide
tgttccgggtctgcatgagc

SEQ ID NO: 8963 - DNA, 20 bp, Artificial
  Synthetically generated peptide
gttccgggtctgcatgagca

SEQ ID NO: 8964 - DNA, 20 bp, Artificial
  Synthetically generated peptide
ttccgggtctgcatgagcaa

SEQ ID NO: 8965 - DNA, 20 bp, Artificial
  Synthetically generated peptide
tccgggtctgcatgagcaaa

SEQ ID NO: 8966 - DNA, 20 bp, Artificial
  Synthetically generated peptide
ccgggtctgcatgagcaaat

SEQ ID NO: 8967 - DNA, 20 bp, Artificial
  Synthetically generated peptide
cgggtctgcatgagcaaata

SEQ ID NO: 8968 - DNA, 20 bp, Artificial
  Synthetically generated peptide
ccgcaattccgtatttgttc

SEQ ID NO: 8969 - DNA, 23 bp, Artificial
  Synthetically generated peptide
gtacgttggcagacgcagtgacg

SEQ ID NO: 8970 - DNA, 20 bp, Artificial
  Synthetically generated peptide
tacgttggcagacgcagtga

SEQ ID NO: 8971 - DNA, 20 bp, Artificial
  Synthetically generated peptide
acgttggcagacgcagtgac

SEQ ID NO: 8972 - DNA, 20 bp, Artificial
  Synthetically generated peptide
cgttggcagacgcagtgacg

SEQ ID NO: 8973 - DNA, 20 bp, Artificial
  Synthetically generated peptide
gttggcagacgcagtgacgt

SEQ ID NO: 8974 - DNA, 20 bp, Artificial
  Synthetically generated peptide
ttggcagacgcagtgacgta

SEQ ID NO: 8975 - DNA, 20 bp, Artificial
  Synthetically generated peptide
tggcagacgcagtgacgtat

SEQ ID NO: 8976 - DNA, 20 bp, Artificial
  Synthetically generated peptide
ggcagacgcagtgacgtatt

SEQ ID NO: 8977 - DNA, 20 bp, Artificial
  Synthetically generated peptide
gcagacgcagtgacgtattt

SEQ ID NO: 8978 - DNA, 20 bp, Artificial
  Synthetically generated peptide
cagacgcagtgacgtatttg

SEQ ID NO: 8979 - DNA, 20 bp, Artificial
  Synthetically generated peptide
agacgcagtgacgtatttga

SEQ ID NO: 8980 - DNA, 20 bp, Artificial
  Synthetically generated peptide
gacgcagtgacgtatttgag

SEQ ID NO: 8981 - DNA, 20 bp, Artificial
  Synthetically generated peptide
acgcagtgacgtatttgaga

SEQ ID NO: 8982 - DNA, 20 bp, Artificial
  Synthetically generated peptide
cgcagtgacgtatttgagag

SEQ ID NO: 8983 - DNA, 20 bp, Artificial
  Synthetically generated peptide
gcagtgacgtatttgagagt

SEQ ID NO: 8984 - DNA, 20 bp, Artificial
  Synthetically generated peptide
tgtacgttggcagacgcagt

SEQ ID NO: 8985 - DNA, 20 bp, Artificial
  Synthetically generated peptide
atgtacgttggcagacgcag

SEQ ID NO: 8986 - DNA, 20 bp, Artificial
  Synthetically generated peptide
catgtacgttggcagacgca

SEQ ID NO: 8987 - DNA, 20 bp, Artificial
  Synthetically generated peptide
tcatgtacgttggcagacgc

SEQ ID NO: 8988 - DNA, 20 bp, Artificial
  Synthetically generated peptide
atcatgtacgttggcagacg

SEQ ID NO: 8989 - DNA, 20 bp, Artificial
  Synthetically generated peptide
tatcatgtacgttggcagac

SEQ ID NO: 8990 - DNA, 20 bp, Artificial
  Synthetically generated peptide
gtatcatgtacgttggcaga

SEQ ID NO: 8991 - DNA, 20 bp, Artificial
  Synthetically generated peptide
ggtatcatgtacgttggcag

SEQ ID NO: 8992 - DNA, 20 bp, Artificial
  Synthetically generated peptide
gggtatcatgtacgttggca

SEQ ID NO: 8993 - DNA, 20 bp, Artificial
  Synthetically generated peptide
tgggtatcatgtacgttggc

SEQ ID NO: 8994 - DNA, 20 bp, Artificial
  Synthetically generated peptide
ctgggtatcatgtacgttgg

SEQ ID NO: 8995 - DNA, 20 bp, Artificial
  Synthetically generated peptide
gctgggtatcatgtacgttg

SEQ ID NO: 8996 - DNA, 20 bp, Artificial
  Synthetically generated peptide
tgctgggtatcatgtacgtt

SEQ ID NO: 8997 - DNA, 20 bp, Artificial
  Synthetically generated peptide
ttgctgggtatcatgtacgt

SEQ ID NO: 8998 - DNA, 20 bp, Artificial
  Synthetically generated peptide
cttgctgggtatcatgtacg

SEQ ID NO: 8999 - DNA, 25 bp, Artificial
  Synthetically generated peptide
cgtgccgtctgtctggctgtcccac

SEQ ID NO: 9000 - DNA, 20 bp, Artificial
  Synthetically generated peptide
gtgccgtctgtctggctgtc

SEQ ID NO: 9001 - DNA, 20 bp, Artificial
  Synthetically generated peptide
tgccgtctgtctggctgtcc

SEQ ID NO: 9002 - DNA, 20 bp, Artificial
  Synthetically generated peptide
gccgtctgtctggctgtccc

SEQ ID NO: 9003 - DNA, 20 bp, Artificial
  Synthetically generated peptide
ccgtctgtctggctgtccca

SEQ ID NO: 9004 - DNA, 20 bp, Artificial
  Synthetically generated peptide
cgtctgtctggctgtcccac

SEQ ID NO: 9005 - DNA, 25 bp, Artificial
  Synthetically generated peptide
cgagtgacagtcgcttttatggggc

SEQ ID NO: 9006 - DNA, 20 bp, Artificial
  Synthetically generated peptide
gagtgacagtcgcttttatg

SEQ ID NO: 9007 - DNA, 20 bp, Artificial
  Synthetically generated peptide
agtgacagtcgcttttatgg

SEQ ID NO: 9008 - DNA, 20 bp, Artificial
  Synthetically generated peptide
gtgacagtcgcttttatggg

SEQ ID NO: 9009 - DNA, 20 bp, Artificial
  Synthetically generated peptide
tgacagtcgcttttatgggg

SEQ ID NO: 9010 - DNA, 20 bp, Artificial
  Synthetically generated peptide
gacagtcgcttttatggggc

SEQ ID NO: 9011 - DNA, 20 bp, Artificial
  Synthetically generated peptide
acagtcgcttttatggggcc

SEQ ID NO: 9012 - DNA, 20 bp, Artificial
  Synthetically generated peptide
cagtcgcttttatggggcct

SEQ ID NO: 9013 - DNA, 20 bp, Artificial
  Synthetically generated peptide
agtcgcttttatggggcctg

SEQ ID NO: 9014 - DNA, 20 bp, Artificial
  Synthetically generated peptide
gtcgcttttatggggcctgc

SEQ ID NO: 9015 - DNA, 20 bp, Artificial
  Synthetically generated peptide
tcgcttttatggggcctgcc

SEQ ID NO: 9016 - DNA, 20 bp, Artificial
  Synthetically generated peptide
cgcttttatggggcctgcca

SEQ ID NO: 9017 - DNA, 20 bp, Artificial
  Synthetically generated peptide
ccgagtgacagtcgctttta

SEQ ID NO: 9018 - DNA, 20 bp, Artificial
  Synthetically generated peptide
accgagtgacagtcgctttt

SEQ ID NO: 9019 - DNA, 20 bp, Artificial
  Synthetically generated peptide
gaccgagtgacagtcgcttt

SEQ ID NO: 9020 - DNA, 20 bp, Artificial
  Synthetically generated peptide
ggaccgagtgacagtcgctt

SEQ ID NO: 9021 - DNA, 20 bp, Artificial
  Synthetically generated peptide
gggaccgagtgacagtcgct

SEQ ID NO: 9022 - DNA, 20 bp, Artificial
  Synthetically generated peptide
tgggaccgagtgacagtcgc

SEQ ID NO: 9023 - DNA, 20 bp, Artificial
  Synthetically generated peptide
ctgggaccgagtgacagtcg

SEQ ID NO: 9024 - DNA, 20 bp, Artificial
  Synthetically generated peptide
tctgggaccgagtgacagtc

SEQ ID NO: 9025 - DNA, 20 bp, Artificial
  Synthetically generated peptide
gtctgggaccgagtgacagt

SEQ ID NO: 9026 - DNA, 20 bp, Artificial
  Synthetically generated peptide
tgtctgggaccgagtgacag

SEQ ID NO: 9027 - DNA, 20 bp, Artificial
  Synthetically generated peptide
gtgtctgggaccgagtgaca

SEQ ID NO: 9028 - DNA, 20 bp, Artificial
  Synthetically generated peptide
ggtgtctgggaccgagtgac

SEQ ID NO: 9029 - DNA, 20 bp, Artificial
  Synthetically generated peptide
tggtgtctgggaccgagtga

SEQ ID NO: 9030 - DNA, 20 bp, Artificial
  Synthetically generated peptide
ctggtgtctgggaccgagtg

SEQ ID NO: 9031 - DNA, 20 bp, Artificial
  Synthetically generated peptide
tctggtgtctgggaccgagt

SEQ ID NO: 9032 - DNA, 20 bp, Artificial
  Synthetically generated peptide
ctctggtgtctgggaccgag

SEQ ID NO: 9033 - DNA, 20 bp, Artificial
  Synthetically generated peptide
gctctggtgtctgggaccga

SEQ ID NO: 9034 - DNA, 20 bp, Artificial
  Synthetically generated peptide
tgctctggtgtctgggaccg

SEQ ID NO: 9035 - DNA, 25 bp, Artificial
  Synthetically generated peptide
cggggcatggccagcagccgccagg

SEQ ID NO: 9036 - DNA, 20 bp, Artificial
  Synthetically generated peptide
ggggcatggccagcagccgc

SEQ ID NO: 9037 - DNA, 20 bp, Artificial
  Synthetically generated peptide
gggcatggccagcagccgcc

SEQ ID NO: 9038 - DNA, 20 bp, Artificial
  Synthetically generated peptide
ggcatggccagcagccgcca

SEQ ID NO: 9039 - DNA, 20 bp, Artificial
  Synthetically generated peptide
gcatggccagcagccgccag

SEQ ID NO: 9040 - DNA, 20 bp, Artificial
  Synthetically generated peptide
catggccagcagccgccagg

SEQ ID NO: 9041 - DNA, 20 bp, Artificial
  Synthetically generated peptide
atggccagcagccgccaggc

SEQ ID NO: 9042 - DNA, 20 bp, Artificial
  Synthetically generated peptide
tggccagcagccgccaggct

SEQ ID NO: 9043 - DNA, 20 bp, Artificial
  Synthetically generated peptide
ggccagcagccgccaggctc

SEQ ID NO: 9044 - DNA, 20 bp, Artificial
  Synthetically generated peptide
gccagcagccgccaggctcc

SEQ ID NO: 9045 - DNA, 20 bp, Artificial
  Synthetically generated peptide
ccagcagccgccaggctcct

SEQ ID NO: 9046 - DNA, 20 bp, Artificial
  Synthetically generated peptide
cagcagccgccaggctcctc

SEQ ID NO: 9047 - DNA, 20 bp, Artificial
  Synthetically generated peptide
agcagccgccaggctcctca

SEQ ID NO: 9048 - DNA, 20 bp, Artificial
  Synthetically generated peptide
gcagccgccaggctcctcag

SEQ ID NO: 9049 - DNA, 20 bp, Artificial
  Synthetically generated peptide
cagccgccaggctcctcagg

SEQ ID NO: 9050 - DNA, 20 bp, Artificial
  Synthetically generated peptide
agccgccaggctcctcagga

SEQ ID NO: 9051 - DNA, 20 bp, Artificial
  Synthetically generated peptide
gccgccaggctcctcaggag

SEQ ID NO: 9052 - DNA, 20 bp, Artificial
  Synthetically generated peptide
ccgccaggctcctcaggagt

SEQ ID NO: 9053 - DNA, 20 bp, Artificial
  Synthetically generated peptide
cgccaggctcctcaggagtg

SEQ ID NO: 9054 - DNA, 20 bp, Artificial
  Synthetically generated peptide
acggggcatggccagcagcc

SEQ ID NO: 9055 - DNA, 20 bp, Artificial
  Synthetically generated peptide
cacggggcatggccagcagc

SEQ ID NO: 9056 - DNA, 20 bp, Artificial
  Synthetically generated peptide
acacggggcatggccagcag

SEQ ID NO: 9057 - DNA, 20 bp, Artificial
  Synthetically generated peptide
cacacggggcatggccagca

SEQ ID NO: 9058 - DNA, 20 bp, Artificial
  Synthetically generated peptide
gcacacggggcatggccagc

SEQ ID NO: 9059 - DNA, 20 bp, Artificial
  Synthetically generated peptide
tgcacacggggcatggccag

SEQ ID NO: 9060 - DNA, 20 bp, Artificial
  Synthetically generated peptide
atgcacacggggcatggcca

SEQ ID NO: 9061 - DNA, 20 bp, Artificial
  Synthetically generated peptide
catgcacacggggcatggcc

SEQ ID NO: 9062 - DNA, 20 bp, Artificial
  Synthetically generated peptide
acatgcacacggggcatggc

SEQ ID NO: 9063 - DNA, 20 bp, Artificial
  Synthetically generated peptide
tacatgcacacggggcatgg

SEQ ID NO: 9064 - DNA, 20 bp, Artificial
  Synthetically generated peptide
ctacatgcacacggggcatg

SEQ ID NO: 9065 - DNA, 20 bp, Artificial
  Synthetically generated peptide
cctacatgcacacggggcat

SEQ ID NO: 9066 - DNA, 20 bp, Artificial
  Synthetically generated peptide
gcctacatgcacacggggca

SEQ ID NO: 9067 - DNA, 20 bp, Artificial
  Synthetically generated peptide
cgcctacatgcacacggggc

SEQ ID NO: 9068 - DNA, 20 bp, Artificial
  Synthetically generated peptide
tcgcctacatgcacacgggg

SEQ ID NO: 9069 - DNA, 20 bp, Artificial
  Synthetically generated peptide
atcgcctacatgcacacggg

SEQ ID NO: 9070 - DNA, 20 bp, Artificial
  Synthetically generated peptide
catcgcctacatgcacacgg

SEQ ID NO: 9071 - DNA, 20 bp, Artificial
  Synthetically generated peptide
ccatcgcctacatgcacacg

SEQ ID NO: 9072 - DNA, 20 bp, Artificial
  Synthetically generated peptide
cccatcgcctacatgcacac

SEQ ID NO: 9073 - DNA, 20 bp, Artificial
  Synthetically generated peptide
ccccatcgcctacatgcaca

SEQ ID NO: 9074 - DNA, 20 bp, Artificial
  Synthetically generated peptide
tccccatcgcctacatgcac

SEQ ID NO: 9075 - DNA, 20 bp, Artificial
  Synthetically generated peptide
ttccccatcgcctacatgca

SEQ ID NO: 9076 - DNA, 20 bp, Artificial
  Synthetically generated peptide
cttccccatcgcctacatgc

SEQ ID NO: 9077 - DNA, 20 bp, Artificial
  Synthetically generated peptide
acttccccatcgcctacatg

SEQ ID NO: 9078 - DNA, 20 bp, Artificial
  Synthetically generated peptide
cacttccccatcgcctacat

SEQ ID NO: 9079 - DNA, 20 bp, Artificial
  Synthetically generated peptide
tcacttccccatcgcctaca

SEQ ID NO: 9080 - DNA, 20 bp, Artificial
  Synthetically generated peptide
ctcacttccccatcgcctac

SEQ ID NO: 9081 - DNA, 20 bp, Artificial
  Synthetically generated peptide
actcacttccccatcgccta

SEQ ID NO: 9082 - DNA, 20 bp, Artificial
  Synthetically generated peptide
cactcacttccccatcgcct

SEQ ID NO: 9083 - DNA, 20 bp, Artificial
  Synthetically generated peptide
ccactcacttccccatcgcc

SEQ ID NO: 9084 - DNA, 20 bp, Artificial
  Synthetically generated peptide
tccactcacttccccatcgc

SEQ ID NO: 9085 - DNA, 20 bp, Artificial
  Synthetically generated peptide
ctccactcacttccccatcg

SEQ ID NO: 9086 - DNA, 25 bp, Artificial
  Synthetically generated peptide
cgtgtgcccgatccgcacgtggtgt

SEQ ID NO: 9087 - DNA, 20 bp, Artificial
  Synthetically generated peptide
gtgtgcccgatccgcacgtg

SEQ ID NO: 9088 - DNA, 20 bp, Artificial
  Synthetically generated peptide
tgtgcccgatccgcacgtgg

SEQ ID NO: 9089 - DNA, 20 bp, Artificial
  Synthetically generated peptide
gtgcccgatccgcacgtggt

SEQ ID NO: 9090 - DNA, 20 bp, Artificial
  Synthetically generated peptide
tgcccgatccgcacgtggtg

SEQ ID NO: 9091 - DNA, 20 bp, Artificial
  Synthetically generated peptide
gcccgatccgcacgtggtgt

SEQ ID NO: 9092 - DNA, 20 bp, Artificial
  Synthetically generated peptide
cccgatccgcacgtggtgtt

SEQ ID NO: 9093 - DNA, 20 bp, Artificial
  Synthetically generated peptide
ccgatccgcacgtggtgttt

SEQ ID NO: 9094 - DNA, 20 bp, Artificial
  Synthetically generated peptide
cgatccgcacgtggtgtttt

SEQ ID NO: 9095 - DNA, 20 bp, Artificial
  Synthetically generated peptide
gatccgcacgtggtgttttc

SEQ ID NO: 9096 - DNA, 20 bp, Artificial
  Synthetically generated peptide
atccgcacgtggtgttttcc

SEQ ID NO: 9097 - DNA, 20 bp, Artificial
  Synthetically generated peptide
tccgcacgtggtgttttccc

SEQ ID NO: 9098 - DNA, 20 bp, Artificial
  Synthetically generated peptide
ccgcacgtggtgttttccca

SEQ ID NO: 9099 - DNA, 20 bp, Artificial
  Synthetically generated peptide
cgcacgtggtgttttcccag

SEQ ID NO: 9100 - DNA, 20 bp, Artificial
  Synthetically generated peptide
gcacgtggtgttttcccagt

SEQ ID NO: 9101 - DNA, 20 bp, Artificial
  Synthetically generated peptide
cacgtggtgttttcccagtg

SEQ ID NO: 9102 - DNA, 20 bp, Artificial
  Synthetically generated peptide
acgtggtgttttcccagtgt

SEQ ID NO: 9103 - DNA, 20 bp, Artificial
  Synthetically generated peptide
cgtggtgttttcccagtgtc

SEQ ID NO: 9104 - DNA, 20 bp, Artificial
  Synthetically generated peptide
gcgtgtgcccgatccgcacg

SEQ ID NO: 9105 - DNA, 20 bp, Artificial
  Synthetically generated peptide
agcgtgtgcccgatccgcac

SEQ ID NO: 9106 - DNA, 20 bp, Artificial
  Synthetically generated peptide
cagcgtgtgcccgatccgca

SEQ ID NO: 9107 - DNA, 20 bp, Artificial
  Synthetically generated peptide
tcagcgtgtgcccgatccgc

SEQ ID NO: 9108 - DNA, 20 bp, Artificial
  Synthetically generated peptide
atcagcgtgtgcccgatccg

SEQ ID NO: 9109 - DNA, 20 bp, Artificial
  Synthetically generated peptide
catcagcgtgtgcccgatcc

SEQ ID NO: 9110 - DNA, 20 bp, Artificial
  Synthetically generated peptide
gcatcagcgtgtgcccgatc

SEQ ID NO: 9111 - DNA, 20 bp, Artificial
  Synthetically generated peptide
agcatcagcgtgtgcccgat

SEQ ID NO: 9112 - DNA, 20 bp, Artificial
  Synthetically generated peptide
aagcatcagcgtgtgcccga

SEQ ID NO: 9113 - DNA, 20 bp, Artificial
  Synthetically generated peptide
caagcatcagcgtgtgcccg

SEQ ID NO: 9114 - DNA, 20 bp, Artificial
  Synthetically generated peptide
gcaagcatcagcgtgtgccc

SEQ ID NO: 9115 - DNA, 20 bp, Artificial
  Synthetically generated peptide
ggcaagcatcagcgtgtgcc

SEQ ID NO: 9116 - DNA, 20 bp, Artificial
  Synthetically generated peptide
gggcaagcatcagcgtgtgc

SEQ ID NO: 9117 - DNA, 20 bp, Artificial
  Synthetically generated peptide
agggcaagcatcagcgtgtg

SEQ ID NO: 9118 - DNA, 20 bp, Artificial
  Synthetically generated peptide
cagggcaagcatcagcgtgt

SEQ ID NO: 9119 - DNA, 20 bp, Artificial
  Synthetically generated peptide
gcagggcaagcatcagcgtg

SEQ ID NO: 9120 - DNA, 20 bp, Artificial
  Synthetically generated peptide
agcagggcaagcatcagcgt

SEQ ID NO: 9121 - DNA, 25 bp, Artificial
  Synthetically generated peptide
cgacaggctgacgggccaagcttgg

SEQ ID NO: 9122 - DNA, 20 bp, Artificial
  Synthetically generated peptide
gacaggctgacgggccaagc

SEQ ID NO: 9123 - DNA, 20 bp, Artificial
  Synthetically generated peptide
acaggctgacgggccaagct

SEQ ID NO: 9124 - DNA, 20 bp, Artificial
  Synthetically generated peptide
caggctgacgggccaagctt

SEQ ID NO: 9125 - DNA, 20 bp, Artificial
  Synthetically generated peptide
aggctgacgggccaagcttg

SEQ ID NO: 9126 - DNA, 20 bp, Artificial
  Synthetically generated peptide
ggctgacgggccaagcttgg

SEQ ID NO: 9127 - DNA, 20 bp, Artificial
  Synthetically generated peptide
gctgacgggccaagcttggc

SEQ ID NO: 9128 - DNA, 20 bp, Artificial
  Synthetically generated peptide
ctgacgggccaagcttggcg

SEQ ID NO: 9129 - DNA, 20 bp, Artificial
  Synthetically generated peptide
tgacgggccaagcttggcgc

SEQ ID NO: 9130 - DNA, 20 bp, Artificial
  Synthetically generated peptide
gacgggccaagcttggcgcc

SEQ ID NO: 9131 - DNA, 20 bp, Artificial
  Synthetically generated peptide
acgggccaagcttggcgccc

SEQ ID NO: 9132 - DNA, 20 bp, Artificial
  Synthetically generated peptide
cgggccaagcttggcgccct

SEQ ID NO: 9133 - DNA, 20 bp, Artificial
  Synthetically generated peptide
gggccaagcttggcgccctg

SEQ ID NO: 9134 - DNA, 20 bp, Artificial
  Synthetically generated peptide
ggccaagcttggcgccctgg

SEQ ID NO: 9135 - DNA, 20 bp, Artificial
  Synthetically generated peptide
gccaagcttggcgccctggc

SEQ ID NO: 9136 - DNA, 20 bp, Artificial
  Synthetically generated peptide
ccaagcttggcgccctggcc

SEQ ID NO: 9137 - DNA, 20 bp, Artificial
  Synthetically generated peptide
caagcttggcgccctggcca

SEQ ID NO: 9138 - DNA, 20 bp, Artificial
  Synthetically generated peptide
aagcttggcgccctggccat

SEQ ID NO: 9139 - DNA, 20 bp, Artificial
  Synthetically generated peptide
agcttggcgccctggccatc

SEQ ID NO: 9140 - DNA, 20 bp, Artificial
  Synthetically generated peptide
gcttggcgccctggccatct

SEQ ID NO: 9141 - DNA, 20 bp, Artificial
  Synthetically generated peptide
cttggcgccctggccatctg

SEQ ID NO: 9142 - DNA, 20 bp, Artificial
  Synthetically generated peptide
ttggcgccctggccatctgc

SEQ ID NO: 9143 - DNA, 20 bp, Artificial
  Synthetically generated peptide
tggcgccctggccatctgcc

SEQ ID NO: 9144 - DNA, 20 bp, Artificial
  Synthetically generated peptide
ggcgccctggccatctgccc

SEQ ID NO: 9145 - DNA, 20 bp, Artificial
  Synthetically generated peptide
gcgccctggccatctgccct

SEQ ID NO: 9146 - DNA, 20 bp, Artificial
  Synthetically generated peptide
cgccctggccatctgccctc

SEQ ID NO: 9147 - DNA, 20 bp, Artificial
  Synthetically generated peptide
gcgacaggctgacgggccaa

SEQ ID NO: 9148 - DNA, 20 bp, Artificial
  Synthetically generated peptide
ggcgacaggctgacgggcca

SEQ ID NO: 9149 - DNA, 20 bp, Artificial
  Synthetically generated peptide
aggcgacaggctgacgggcc

SEQ ID NO: 9150 - DNA, 25 bp, Artificial
  Synthetically generated peptide
cggatgggcagggaggataccgttt

SEQ ID NO: 9151 - DNA, 25 bp, Artificial
  Synthetically generated peptide
cgtgggcggcggcggctgcgtggtg

SEQ ID NO: 9152 - DNA, 20 bp, Artificial
  Synthetically generated peptide
gtgggcggcggcggctgcgt

SEQ ID NO: 9153 - DNA, 20 bp, Artificial
  Synthetically generated peptide
tgggcggcggcggctgcgtg

SEQ ID NO: 9154 - DNA, 20 bp, Artificial
  Synthetically generated peptide
gggcggcggcggctgcgtgg

SEQ ID NO: 9155 - DNA, 20 bp, Artificial
  Synthetically generated peptide
ggcggcggcggctgcgtggt

SEQ ID NO: 9156 - DNA, 20 bp, Artificial
  Synthetically generated peptide
gcggcggcggctgcgtggtg

SEQ ID NO: 9157 - DNA, 20 bp, Artificial
  Synthetically generated peptide
cggcggcggctgcgtggtgg

SEQ ID NO: 9158 - DNA, 20 bp, Artificial
  Synthetically generated peptide
ggcggcggctgcgtggtggt

SEQ ID NO: 9159 - DNA, 20 bp, Artificial
  Synthetically generated peptide
gcggcggctgcgtggtggtg

SEQ ID NO: 9160 - DNA, 20 bp, Artificial
  Synthetically generated peptide
cggcggctgcgtggtggtgg

SEQ ID NO: 9161 - DNA, 20 bp, Artificial
  Synthetically generated peptide
ggcggctgcgtggtggtggc

SEQ ID NO: 9162 - DNA, 20 bp, Artificial
  Synthetically generated peptide
gcggctgcgtggtggtggcg

SEQ ID NO: 9163 - DNA, 20 bp, Artificial
  Synthetically generated peptide
cggctgcgtggtggtggcgg

SEQ ID NO: 9164 - DNA, 20 bp, Artificial
  Synthetically generated peptide
ggctgcgtggtggtggcggg

SEQ ID NO: 9165 - DNA, 20 bp, Artificial
  Synthetically generated peptide
gctgcgtggtggtggcgggc

SEQ ID NO: 9166 - DNA, 20 bp, Artificial
  Synthetically generated peptide
ctgcgtggtggtggcgggcg

SEQ ID NO: 9167 - DNA, 19 bp, Artificial
  Synthetically generated peptide
tgcgtggtggtggcgggcg

SEQ ID NO: 9168 - DNA, 18 bp, Artificial
  Synthetically generated peptide
gcgtggtggtggcgggcg

SEQ ID NO: 9169 - DNA, 17 bp, Artificial
  Synthetically generated peptide
cgtggtggtggcgggcg

SEQ ID NO: 9170 - DNA, 16 bp, Artificial
  Synthetically generated peptide
gtggtggtggcgggcg

SEQ ID NO: 9171 - DNA, 15 bp, Artificial
  Synthetically generated peptide
tggtggtggcgggcg

SEQ ID NO: 9172 - DNA, 20 bp, Artificial
  Synthetically generated peptide
gcgtgggcggcggcggctgc

SEQ ID NO: 9173 - DNA, 20 bp, Artificial
  Synthetically generated peptide
ggcgtgggcggcggcggctg

SEQ ID NO: 9174 - DNA, 20 bp, Artificial
  Synthetically generated peptide
cggcgtgggcggcggcggct

SEQ ID NO: 9175 - DNA, 20 bp, Artificial
  Synthetically generated peptide
ccggcgtgggcggcggcggc

SEQ ID NO: 9176 - DNA, 20 bp, Artificial
  Synthetically generated peptide
gccggcgtgggcggcggcgg

SEQ ID NO: 9177 - DNA, 20 bp, Artificial
  Synthetically generated peptide
ggccggcgtgggcggcggcg

SEQ ID NO: 9178 - DNA, 20 bp, Artificial
  Synthetically generated peptide
aggccggcgtgggcggcggc

SEQ ID NO: 9179 - DNA, 24 bp, Artificial
  Synthetically generated peptide
ccgattggtggaggcaggaggagg

SEQ ID NO: 9180 - DNA, 26 bp, Artificial
  Synthetically generated peptide
cgagattgagatcttctgcgacgcgg

SEQ ID NO: 9181 - DNA, 20 bp, Artificial
  Synthetically generated peptide
gagattgagatcttctgcga

SEQ ID NO: 9182 - DNA, 20 bp, Artificial
  Synthetically generated peptide
agattgagatcttctgcgac

SEQ ID NO: 9183 - DNA, 20 bp, Artificial
  Synthetically generated peptide
gattgagatcttctgcgacg

SEQ ID NO: 9184 - DNA, 20 bp, Artificial
  Synthetically generated peptide
attgagatcttctgcgacgc

SEQ ID NO: 9185 - DNA, 20 bp, Artificial
  Synthetically generated peptide
ttgagatcttctgcgacgcg

SEQ ID NO: 9186 - DNA, 20 bp, Artificial
  Synthetically generated peptide
tgagatcttctgcgacgcgg

SEQ ID NO: 9187 - DNA, 20 bp, Artificial
  Synthetically generated peptide
gagatcttctgcgacgcggc

SEQ ID NO: 9188 - DNA, 20 bp, Artificial
  Synthetically generated peptide
agatcttctgcgacgcggcg

SEQ ID NO: 9189 - DNA, 20 bp, Artificial
  Synthetically generated peptide
gatcttctgcgacgcggcga

SEQ ID NO: 9190 - DNA, 20 bp, Artificial
  Synthetically generated peptide
atcttctgcgacgcggcgat

SEQ ID NO: 9191 - DNA, 20 bp, Artificial
  Synthetically generated peptide
tcttctgcgacgcggcgatt

SEQ ID NO: 9192 - DNA, 20 bp, Artificial
  Synthetically generated peptide
cttctgcgacgcggcgattg

SEQ ID NO: 9193 - DNA, 20 bp, Artificial
  Synthetically generated peptide
ttctgcgacgcggcgattga

SEQ ID NO: 9194 - DNA, 20 bp, Artificial
  Synthetically generated peptide
tctgcgacgcggcgattgag

SEQ ID NO: 9195 - DNA, 20 bp, Artificial
  Synthetically generated peptide
ctgcgacgcggcgattgaga

SEQ ID NO: 9196 - DNA, 20 bp, Artificial
  Synthetically generated peptide
tgcgacgcggcgattgagac

SEQ ID NO: 9197 - DNA, 20 bp, Artificial
  Synthetically generated peptide
gcgacgcggcgattgagacc

SEQ ID NO: 9198 - DNA, 20 bp, Artificial
  Synthetically generated peptide
cgacgcggcgattgagacct

SEQ ID NO: 9199 - DNA, 20 bp, Artificial
  Synthetically generated peptide
gacgcggcgattgagacctt

SEQ ID NO: 9200 - DNA, 20 bp, Artificial
  Synthetically generated peptide
acgcggcgattgagaccttc

SEQ ID NO: 9201 - DNA, 20 bp, Artificial
  Synthetically generated peptide
cgcggcgattgagaccttcg

SEQ ID NO: 9202 - DNA, 20 bp, Artificial
  Synthetically generated peptide
gcggcgattgagaccttcgt

SEQ ID NO: 9203 - DNA, 20 bp, Artificial
  Synthetically generated peptide
cggcgattgagaccttcgtc

SEQ ID NO: 9204 - DNA, 20 bp, Artificial
  Synthetically generated peptide
ggcgattgagaccttcgtct

SEQ ID NO: 9205 - DNA, 20 bp, Artificial
  Synthetically generated peptide
gcgattgagaccttcgtctg

SEQ ID NO: 9206 - DNA, 20 bp, Artificial
  Synthetically generated peptide
cgattgagaccttcgtctgc

SEQ ID NO: 9207 - DNA, 20 bp, Artificial
  Synthetically generated peptide
gattgagaccttcgtctgcg

SEQ ID NO: 9208 - DNA, 20 bp, Artificial
  Synthetically generated peptide
attgagaccttcgtctgcga

SEQ ID NO: 9209 - DNA, 20 bp, Artificial
  Synthetically generated peptide
ttgagaccttcgtctgcgag

SEQ ID NO: 9210 - DNA, 20 bp, Artificial
  Synthetically generated peptide
tgagaccttcgtctgcgagg

SEQ ID NO: 9211 - DNA, 20 bp, Artificial
  Synthetically generated peptide
gagaccttcgtctgcgaggc

SEQ ID NO: 9212 - DNA, 20 bp, Artificial
  Synthetically generated peptide
agaccttcgtctgcgaggcg

SEQ ID NO: 9213 - DNA, 20 bp, Artificial
  Synthetically generated peptide
gaccttcgtctgcgaggcga

SEQ ID NO: 9214 - DNA, 20 bp, Artificial
  Synthetically generated peptide
accttcgtctgcgaggcgag

SEQ ID NO: 9215 - DNA, 20 bp, Artificial
  Synthetically generated peptide
ccttcgtctgcgaggcgagg

SEQ ID NO: 9216 - DNA, 20 bp, Artificial
  Synthetically generated peptide
cttcgtctgcgaggcgaggg

SEQ ID NO: 9217 - DNA, 20 bp, Artificial
  Synthetically generated peptide
ttcgtctgcgaggcgaggga

SEQ ID NO: 9218 - DNA, 20 bp, Artificial
  Synthetically generated peptide
tcgtctgcgaggcgagggag

SEQ ID NO: 9219 - DNA, 20 bp, Artificial
  Synthetically generated peptide
cgtctgcgaggcgagggagt

SEQ ID NO: 9220 - DNA, 20 bp, Artificial
  Synthetically generated peptide
gtctgcgaggcgagggagtt

SEQ ID NO: 9221 - DNA, 20 bp, Artificial
  Synthetically generated peptide
tctgcgaggcgagggagttc

SEQ ID NO: 9222 - DNA, 20 bp, Artificial
  Synthetically generated peptide
ctgcgaggcgagggagttct

SEQ ID NO: 9223 - DNA, 20 bp, Artificial
  Synthetically generated peptide
tgcgaggcgagggagttctt

SEQ ID NO: 9224 - DNA, 20 bp, Artificial
  Synthetically generated peptide
gcgaggcgagggagttcttc

SEQ ID NO: 9225 - DNA, 20 bp, Artificial
  Synthetically generated peptide
cgaggcgagggagttcttct

SEQ ID NO: 9226 - DNA, 20 bp, Artificial
  Synthetically generated peptide
gaggcgagggagttcttctt

SEQ ID NO: 9227 - DNA, 20 bp, Artificial
  Synthetically generated peptide
aggcgagggagttcttcttc

SEQ ID NO: 9228 - DNA, 20 bp, Artificial
  Synthetically generated peptide
ggcgagggagttcttcttct

SEQ ID NO: 9229 - DNA, 20 bp, Artificial
  Synthetically generated peptide
gcgagggagttcttcttcta

SEQ ID NO: 9230 - DNA, 20 bp, Artificial
  Synthetically generated peptide
cgagggagttcttcttctag

SEQ ID NO: 9231 - DNA, 20 bp, Artificial
  Synthetically generated peptide
ccgagattgagatcttctgc

SEQ ID NO: 9232 - DNA, 20 bp, Artificial
  Synthetically generated peptide
cccgagattgagatcttctg

SEQ ID NO: 9233 - DNA, 20 bp, Artificial
  Synthetically generated peptide
tcccgagattgagatcttct

SEQ ID NO: 9234 - DNA, 20 bp, Artificial
  Synthetically generated peptide
ttcccgagattgagatcttc

SEQ ID NO: 9235 - DNA, 22 bp, Artificial
  Synthetically generated peptide
cgcggcgattgagaccttcgtc

SEQ ID NO: 9236 - DNA, 20 bp, Artificial
  Synthetically generated peptide
gcggcgattgagaccttcgt

SEQ ID NO: 9237 - DNA, 20 bp, Artificial
  Synthetically generated peptide
cggcgattgagaccttcgtc

SEQ ID NO: 9238 - DNA, 20 bp, Artificial
  Synthetically generated peptide
ggcgattgagaccttcgtct

SEQ ID NO: 9239 - DNA, 20 bp, Artificial
  Synthetically generated peptide
gcgattgagaccttcgtctg

SEQ ID NO: 9240 - DNA, 20 bp, Artificial
  Synthetically generated peptide
cgattgagaccttcgtctgc

SEQ ID NO: 9241 - DNA, 20 bp, Artificial
  Synthetically generated peptide
gattgagaccttcgtctgcg

SEQ ID NO: 9242 - DNA, 20 bp, Artificial
  Synthetically generated peptide
attgagaccttcgtctgcga

SEQ ID NO: 9243 - DNA, 20 bp, Artificial
  Synthetically generated peptide
ttgagaccttcgtctgcgag

SEQ ID NO: 9244 - DNA, 20 bp, Artificial
  Synthetically generated peptide
tgagaccttcgtctgcgagg

SEQ ID NO: 9245 - DNA, 20 bp, Artificial
  Synthetically generated peptide
gagaccttcgtctgcgaggc

SEQ ID NO: 9246 - DNA, 20 bp, Artificial
  Synthetically generated peptide
agaccttcgtctgcgaggcg

SEQ ID NO: 9247 - DNA, 20 bp, Artificial
  Synthetically generated peptide
gaccttcgtctgcgaggcga

SEQ ID NO: 9248 - DNA, 20 bp, Artificial
  Synthetically generated peptide
accttcgtctgcgaggcgag

SEQ ID NO: 9249 - DNA, 20 bp, Artificial
  Synthetically generated peptide
ccttcgtctgcgaggcgagg

SEQ ID NO: 9250 - DNA, 20 bp, Artificial
  Synthetically generated peptide
cttcgtctgcgaggcgaggg

SEQ ID NO: 9251 - DNA, 20 bp, Artificial
  Synthetically generated peptide
ttcgtctgcgaggcgaggga

SEQ ID NO: 9252 - DNA, 20 bp, Artificial
  Synthetically generated peptide
tcgtctgcgaggcgagggag

SEQ ID NO: 9253 - DNA, 20 bp, Artificial
  Synthetically generated peptide
cgtctgcgaggcgagggagt

SEQ ID NO: 9254 - DNA, 20 bp, Artificial
  Synthetically generated peptide
gtctgcgaggcgagggagtt

SEQ ID NO: 9255 - DNA, 20 bp, Artificial
  Synthetically generated peptide
tctgcgaggcgagggagttc

SEQ ID NO: 9256 - DNA, 20 bp, Artificial
  Synthetically generated peptide
ctgcgaggcgagggagttct

SEQ ID NO: 9257 - DNA, 20 bp, Artificial
  Synthetically generated peptide
tgcgaggcgagggagttctt

SEQ ID NO: 9258 - DNA, 20 bp, Artificial
  Synthetically generated peptide
gcgaggcgagggagttcttc

SEQ ID NO: 9259 - DNA, 20 bp, Artificial
  Synthetically generated peptide
cgaggcgagggagttcttct

SEQ ID NO: 9260 - DNA, 20 bp, Artificial
  Synthetically generated peptide
gaggcgagggagttcttctt

SEQ ID NO: 9261 - DNA, 20 bp, Artificial
  Synthetically generated peptide
aggcgagggagttcttcttc

SEQ ID NO: 9262 - DNA, 20 bp, Artificial
  Synthetically generated peptide
ggcgagggagttcttcttct

SEQ ID NO: 9263 - DNA, 20 bp, Artificial
  Synthetically generated peptide
gcgagggagttcttcttcta

SEQ ID NO: 9264 - DNA, 20 bp, Artificial
  Synthetically generated peptide
cgagggagttcttcttctag

SEQ ID NO: 9265 - DNA, 20 bp, Artificial
  Synthetically generated peptide
acgcggcgattgagaccttc

SEQ ID NO: 9266 - DNA, 20 bp, Artificial
  Synthetically generated peptide
gacgcggcgattgagacctt

SEQ ID NO: 9267 - DNA, 20 bp, Artificial
  Synthetically generated peptide
cgacgcggcgattgagacct

SEQ ID NO: 9268 - DNA, 20 bp, Artificial
  Synthetically generated peptide
gcgacgcggcgattgagacc

SEQ ID NO: 9269 - DNA, 20 bp, Artificial
  Synthetically generated peptide
tgcgacgcggcgattgagac

SEQ ID NO: 9270 - DNA, 20 bp, Artificial
  Synthetically generated peptide
ctgcgacgcggcgattgaga

SEQ ID NO: 9271 - DNA, 20 bp, Artificial
  Synthetically generated peptide
tctgcgacgcggcgattgag

SEQ ID NO: 9272 - DNA, 20 bp, Artificial
  Synthetically generated peptide
ttctgcgacgcggcgattga

SEQ ID NO: 9273 - DNA, 20 bp, Artificial
  Synthetically generated peptide
cttctgcgacgcggcgattg

SEQ ID NO: 9274 - DNA, 20 bp, Artificial
  Synthetically generated peptide
tcttctgcgacgcggcgatt

SEQ ID NO: 9275 - DNA, 20 bp, Artificial
  Synthetically generated peptide
atcttctgcgacgcggcgat

SEQ ID NO: 9276 - DNA, 20 bp, Artificial
  Synthetically generated peptide
gatcttctgcgacgcggcga

SEQ ID NO: 9277 - DNA, 20 bp, Artificial
  Synthetically generated peptide
agatcttctgcgacgcggcg

SEQ ID NO: 9278 - DNA, 20 bp, Artificial
  Synthetically generated peptide
gagatcttctgcgacgcggc

SEQ ID NO: 9279 - DNA, 20 bp, Artificial
  Synthetically generated peptide
tgagatcttctgcgacgcgg

SEQ ID NO: 9280 - DNA, 20 bp, Artificial
  Synthetically generated peptide
ttgagatcttctgcgacgcg

SEQ ID NO: 9281 - DNA, 20 bp, Artificial
  Synthetically generated peptide
attgagatcttctgcgacgc

SEQ ID NO: 9282 - DNA, 20 bp, Artificial
  Synthetically generated peptide
gattgagatcttctgcgacg

SEQ ID NO: 9283 - DNA, 20 bp, Artificial
  Synthetically generated peptide
agattgagatcttctgcgac

SEQ ID NO: 9284 - DNA, 20 bp, Artificial
  Synthetically generated peptide
gagattgagatcttctgcga

SEQ ID NO: 9285 - DNA, 20 bp, Artificial
  Synthetically generated peptide
cgagattgagatcttctgcg

SEQ ID NO: 9286 - DNA, 20 bp, Artificial
  Synthetically generated peptide
ccgagattgagatcttctgc

SEQ ID NO: 9287 - DNA, 20 bp, Artificial
  Synthetically generated peptide
cccgagattgagatcttctg

SEQ ID NO: 9288 - DNA, 20 bp, Artificial
  Synthetically generated peptide
tcccgagattgagatcttct

SEQ ID NO: 9289 - DNA, 20 bp, Artificial
  Synthetically generated peptide
ttcccgagattgagatcttc

SEQ ID NO: 9290 - DNA, 26 bp, Artificial
  Synthetically generated peptide
cgtctgcgaggcgagggagttcttct

SEQ ID NO: 9291 - DNA, 20 bp, Artificial
  Synthetically generated peptide
gtctgcgaggcgagggagtt

SEQ ID NO: 9292 - DNA, 20 bp, Artificial
  Synthetically generated peptide
tctgcgaggcgagggagttc

SEQ ID NO: 9293 - DNA, 20 bp, Artificial
  Synthetically generated peptide
ctgcgaggcgagggagttct

SEQ ID NO: 9294 - DNA, 20 bp, Artificial
  Synthetically generated peptide
tgcgaggcgagggagttctt

SEQ ID NO: 9295 - DNA, 20 bp, Artificial
  Synthetically generated peptide
gcgaggcgagggagttcttc

SEQ ID NO: 9296 - DNA, 20 bp, Artificial
  Synthetically generated peptide
cgaggcgagggagttcttct

SEQ ID NO: 9297 - DNA, 20 bp, Artificial
  Synthetically generated peptide
gaggcgagggagttcttctt

SEQ ID NO: 9298 - DNA, 20 bp, Artificial
  Synthetically generated peptide
aggcgagggagttcttcttc

SEQ ID NO: 9299 - DNA, 20 bp, Artificial
  Synthetically generated peptide
ggcgagggagttcttcttct

SEQ ID NO: 9300 - DNA, 20 bp, Artificial
  Synthetically generated peptide
gcgagggagttcttcttcta

SEQ ID NO: 9301 - DNA, 20 bp, Artificial
  Synthetically generated peptide
cgagggagttcttcttctag

SEQ ID NO: 9302 - DNA, 20 bp, Artificial
  Synthetically generated peptide
tcgtctgcgaggcgagggag

SEQ ID NO: 9303 - DNA, 20 bp, Artificial
  Synthetically generated peptide
ttcgtctgcgaggcgaggga

SEQ ID NO: 9304 - DNA, 20 bp, Artificial
  Synthetically generated peptide
cttcgtctgcgaggcgaggg

SEQ ID NO: 9305 - DNA, 20 bp, Artificial
  Synthetically generated peptide
ccttcgtctgcgaggcgagg

SEQ ID NO: 9306 - DNA, 20 bp, Artificial
  Synthetically generated peptide
accttcgtctgcgaggcgag

SEQ ID NO: 9307 - DNA, 20 bp, Artificial
  Synthetically generated peptide
gaccttcgtctgcgaggcga

SEQ ID NO: 9308 - DNA, 20 bp, Artificial
  Synthetically generated peptide
agaccttcgtctgcgaggcg

SEQ ID NO: 9309 - DNA, 20 bp, Artificial
  Synthetically generated peptide
gagaccttcgtctgcgaggc

SEQ ID NO: 9310 - DNA, 20 bp, Artificial
  Synthetically generated peptide
tgagaccttcgtctgcgagg

SEQ ID NO: 9311 - DNA, 20 bp, Artificial
  Synthetically generated peptide
ttgagaccttcgtctgcgag

SEQ ID NO: 9312 - DNA, 20 bp, Artificial
  Synthetically generated peptide
attgagaccttcgtctgcga

SEQ ID NO: 9313 - DNA, 20 bp, Artificial
  Synthetically generated peptide
gattgagaccttcgtctgcg

SEQ ID NO: 9314 - DNA, 20 bp, Artificial
  Synthetically generated peptide
cgattgagaccttcgtctgc

SEQ ID NO: 9315 - DNA, 20 bp, Artificial
  Synthetically generated peptide
gcgattgagaccttcgtctg

SEQ ID NO: 9316 - DNA, 20 bp, Artificial
  Synthetically generated peptide
ggcgattgagaccttcgtct

SEQ ID NO: 9317 - DNA, 20 bp, Artificial
  Synthetically generated peptide
cggcgattgagaccttcgtc

SEQ ID NO: 9318 - DNA, 20 bp, Artificial
  Synthetically generated peptide
gcggcgattgagaccttcgt

SEQ ID NO: 9319 - DNA, 20 bp, Artificial
  Synthetically generated peptide
cgcggcgattgagaccttcg

SEQ ID NO: 9320 - DNA, 20 bp, Artificial
  Synthetically generated peptide
acgcggcgattgagaccttc

SEQ ID NO: 9321 - DNA, 20 bp, Artificial
  Synthetically generated peptide
gacgcggcgattgagacctt

SEQ ID NO: 9322 - DNA, 20 bp, Artificial
  Synthetically generated peptide
cgacgcggcgattgagacct

SEQ ID NO: 9323 - DNA, 20 bp, Artificial
  Synthetically generated peptide
gcgacgcggcgattgagacc

SEQ ID NO: 9324 - DNA, 20 bp, Artificial
  Synthetically generated peptide
tgcgacgcggcgattgagac

SEQ ID NO: 9325 - DNA, 20 bp, Artificial
  Synthetically generated peptide
ctgcgacgcggcgattgaga

SEQ ID NO: 9326 - DNA, 20 bp, Artificial
  Synthetically generated peptide
tctgcgacgcggcgattgag

SEQ ID NO: 9327 - DNA, 20 bp, Artificial
  Synthetically generated peptide
ttctgcgacgcggcgattga

SEQ ID NO: 9328 - DNA, 20 bp, Artificial
  Synthetically generated peptide
cttctgcgacgcggcgattg

SEQ ID NO: 9329 - DNA, 20 bp, Artificial
  Synthetically generated peptide
tcttctgcgacgcggcgatt

SEQ ID NO: 9330 - DNA, 20 bp, Artificial
  Synthetically generated peptide
atcttctgcgacgcggcgat

SEQ ID NO: 9331 - DNA, 20 bp, Artificial
  Synthetically generated peptide
gatcttctgcgacgcggcga

SEQ ID NO: 9332 - DNA, 20 bp, Artificial
  Synthetically generated peptide
agatcttctgcgacgcggcg

SEQ ID NO: 9333 - DNA, 20 bp, Artificial
  Synthetically generated peptide
gagatcttctgcgacgcggc

SEQ ID NO: 9334 - DNA, 20 bp, Artificial
  Synthetically generated peptide
tgagatcttctgcgacgcgg

SEQ ID NO: 9335 - DNA, 20 bp, Artificial
  Synthetically generated peptide
ttgagatcttctgcgacgcg

SEQ ID NO: 9336 - DNA, 20 bp, Artificial
  Synthetically generated peptide
attgagatcttctgcgacgc

SEQ ID NO: 9337 - DNA, 20 bp, Artificial
  Synthetically generated peptide
gattgagatcttctgcgacg

SEQ ID NO: 9338 - DNA, 20 bp, Artificial
  Synthetically generated peptide
agattgagatcttctgcgac

SEQ ID NO: 9339 - DNA, 20 bp, Artificial
  Synthetically generated peptide
gagattgagatcttctgcga

SEQ ID NO: 9340 - DNA, 20 bp, Artificial
  Synthetically generated peptide
cgagattgagatcttctgcg

SEQ ID NO: 9341 - DNA, 20 bp, Artificial
  Synthetically generated peptide
ccgagattgagatcttctgc

SEQ ID NO: 9342 - DNA, 20 bp, Artificial
  Synthetically generated peptide
cccgagattgagatcttctg

SEQ ID NO: 9343 - DNA, 20 bp, Artificial
  Synthetically generated peptide
tcccgagattgagatcttct

SEQ ID NO: 9344 - DNA, 20 bp, Artificial
  Synthetically generated peptide
ttcccgagattgagatcttc

SEQ ID NO: 9345 - DNA, 22 bp, Artificial
  Synthetically generated peptide
cgatacagagcagaggcggtgt

SEQ ID NO: 9346 - DNA, 26 bp, Artificial
  Synthetically generated peptide
cgcgtaaagagaggtgcgccccgtgg

SEQ ID NO: 9347 - DNA, 20 bp, Artificial
  Synthetically generated peptide
gcgtaaagagaggtgcgccc

SEQ ID NO: 9348 - DNA, 20 bp, Artificial
  Synthetically generated peptide
cgtaaagagaggtgcgcccc

SEQ ID NO: 9349 - DNA, 20 bp, Artificial
  Synthetically generated peptide
gtaaagagaggtgcgccccg

SEQ ID NO: 9350 - DNA, 20 bp, Artificial
  Synthetically generated peptide
taaagagaggtgcgccccgt

SEQ ID NO: 9351 - DNA, 20 bp, Artificial
  Synthetically generated peptide
aaagagaggtgcgccccgtg

SEQ ID NO: 9352 - DNA, 20 bp, Artificial
  Synthetically generated peptide
aagagaggtgcgccccgtgg

SEQ ID NO: 9353 - DNA, 20 bp, Artificial
  Synthetically generated peptide
agagaggtgcgccccgtggt

SEQ ID NO: 9354 - DNA, 20 bp, Artificial
  Synthetically generated peptide
gagaggtgcgccccgtggtc

SEQ ID NO: 9355 - DNA, 20 bp, Artificial
  Synthetically generated peptide
agaggtgcgccccgtggtcg

SEQ ID NO: 9356 - DNA, 20 bp, Artificial
  Synthetically generated peptide
gaggtgcgccccgtggtcgg

SEQ ID NO: 9357 - DNA, 20 bp, Artificial
  Synthetically generated peptide
aggtgcgccccgtggtcggc

SEQ ID NO: 9358 - DNA, 20 bp, Artificial
  Synthetically generated peptide
ggtgcgccccgtggtcggcc

SEQ ID NO: 9359 - DNA, 20 bp, Artificial
  Synthetically generated peptide
ccgcgtaaagagaggtgcgc

SEQ ID NO: 9360 - DNA, 27 bp, Artificial
  Synthetically generated peptide
acgggtcgtccgcgggattcagcgccg

SEQ ID NO: 9361 - DNA, 20 bp, Artificial
  Synthetically generated peptide
cgggtcgtccgcgggattca

SEQ ID NO: 9362 - DNA, 20 bp, Artificial
  Synthetically generated peptide
gggtcgtccgcgggattcag

SEQ ID NO: 9363 - DNA, 20 bp, Artificial
  Synthetically generated peptide
ggtcgtccgcgggattcagc

SEQ ID NO: 9364 - DNA, 20 bp, Artificial
  Synthetically generated peptide
gtcgtccgcgggattcagcg

SEQ ID NO: 9365 - DNA, 20 bp, Artificial
  Synthetically generated peptide
tcgtccgcgggattcagcgc

SEQ ID NO: 9366 - DNA, 20 bp, Artificial
  Synthetically generated peptide
cgtccgcgggattcagcgcc

SEQ ID NO: 9367 - DNA, 20 bp, Artificial
  Synthetically generated peptide
gtccgcgggattcagcgccg

SEQ ID NO: 9368 - DNA, 20 bp, Artificial
  Synthetically generated peptide
tccgcgggattcagcgccga

SEQ ID NO: 9369 - DNA, 20 bp, Artificial
  Synthetically generated peptide
ccgcgggattcagcgccgac

SEQ ID NO: 9370 - DNA, 20 bp, Artificial
  Synthetically generated peptide
cgcgggattcagcgccgacg

SEQ ID NO: 9371 - DNA, 20 bp, Artificial
  Synthetically generated peptide
gcgggattcagcgccgacgg

SEQ ID NO: 9372 - DNA, 20 bp, Artificial
  Synthetically generated peptide
cgggattcagcgccgacggg

SEQ ID NO: 9373 - DNA, 20 bp, Artificial
  Synthetically generated peptide
gggattcagcgccgacggga

SEQ ID NO: 9374 - DNA, 20 bp, Artificial
  Synthetically generated peptide
ggattcagcgccgacgggac

SEQ ID NO: 9375 - DNA, 20 bp, Artificial
  Synthetically generated peptide
gattcagcgccgacgggacg

SEQ ID NO: 9376 - DNA, 20 bp, Artificial
  Synthetically generated peptide
attcagcgccgacgggacgt

SEQ ID NO: 9377 - DNA, 20 bp, Artificial
  Synthetically generated peptide
ttcagcgccgacgggacgta

SEQ ID NO: 9378 - DNA, 20 bp, Artificial
  Synthetically generated peptide
tcagcgccgacgggacgtag

SEQ ID NO: 9379 - DNA, 20 bp, Artificial
  Synthetically generated peptide
cagcgccgacgggacgtaga

SEQ ID NO: 9380 - DNA, 20 bp, Artificial
  Synthetically generated peptide
agcgccgacgggacgtagac

SEQ ID NO: 9381 - DNA, 20 bp, Artificial
  Synthetically generated peptide
gcgccgacgggacgtagaca

SEQ ID NO: 9382 - DNA, 20 bp, Artificial
  Synthetically generated peptide
cgccgacgggacgtagacaa

SEQ ID NO: 9383 - DNA, 20 bp, Artificial
  Synthetically generated peptide
gacgggtcgtccgcgggatt

SEQ ID NO: 9384 - DNA, 20 bp, Artificial
  Synthetically generated peptide
agacgggtcgtccgcgggat

SEQ ID NO: 9385 - DNA, 20 bp, Artificial
  Synthetically generated peptide
gagacgggtcgtccgcggga

SEQ ID NO: 9386 - DNA, 20 bp, Artificial
  Synthetically generated peptide
cgagacgggtcgtccgcggg

SEQ ID NO: 9387 - DNA, 20 bp, Artificial
  Synthetically generated peptide
ccgagacgggtcgtccgcgg

SEQ ID NO: 9388 - DNA, 20 bp, Artificial
  Synthetically generated peptide
cccgagacgggtcgtccgcg

SEQ ID NO: 9389 - DNA, 20 bp, Artificial
  Synthetically generated peptide
ccccgagacgggtcgtccgc

SEQ ID NO: 9390 - DNA, 20 bp, Artificial
  Synthetically generated peptide
gccccgagacgggtcgtccg

SEQ ID NO: 9391 - DNA, 20 bp, Artificial
  Synthetically generated peptide
ggccccgagacgggtcgtcc

SEQ ID NO: 9392 - DNA, 20 bp, Artificial
  Synthetically generated peptide
cggccccgagacgggtcgtc

SEQ ID NO: 9393 - DNA, 20 bp, Artificial
  Synthetically generated peptide
acggccccgagacgggtcgt

SEQ ID NO: 9394 - DNA, 20 bp, Artificial
  Synthetically generated peptide
aacggccccgagacgggtcg

SEQ ID NO: 9395 - DNA, 20 bp, Artificial
  Synthetically generated peptide
aaacggccccgagacgggtc

SEQ ID NO: 9396 - DNA, 20 bp, Artificial
  Synthetically generated peptide
caaacggccccgagacgggt

SEQ ID NO: 9397 - DNA, 20 bp, Artificial
  Synthetically generated peptide
ccaaacggccccgagacggg

SEQ ID NO: 9398 - DNA, 20 bp, Artificial
  Synthetically generated peptide
cccaaacggccccgagacgg

SEQ ID NO: 9399 - DNA, 20 bp, Artificial
  Synthetically generated peptide
gcccaaacggccccgagacg

SEQ ID NO: 9400 - DNA, 20 bp, Artificial
  Synthetically generated peptide
ggcccaaacggccccgagac

SEQ ID NO: 9401 - DNA, 20 bp, Artificial
  Synthetically generated peptide
aggcccaaacggccccgaga

SEQ ID NO: 9402 - DNA, 20 bp, Artificial
  Synthetically generated peptide
gaggcccaaacggccccgag

SEQ ID NO: 9403 - DNA, 20 bp, Artificial
  Synthetically generated peptide
agaggcccaaacggccccga

SEQ ID NO: 9404 - DNA, 20 bp, Artificial
  Synthetically generated peptide
tagaggcccaaacggccccg

SEQ ID NO: 9405 - DNA, 20 bp, Artificial
  Synthetically generated peptide
gtagaggcccaaacggcccc

SEQ ID NO: 9406 - DNA, 20 bp, Artificial
  Synthetically generated peptide
ggtagaggcccaaacggccc

SEQ ID NO: 9407 - DNA, 20 bp, Artificial
  Synthetically generated peptide
cggtagaggcccaaacggcc

SEQ ID NO: 9408 - DNA, 20 bp, Artificial
  Synthetically generated peptide
acggtagaggcccaaacggc

SEQ ID NO: 9409 - DNA, 23 bp, Artificial
  Synthetically generated peptide
cgtcccgcgcaggatccagttgg

SEQ ID NO: 9410 - DNA, 20 bp, Artificial
  Synthetically generated peptide
gtcccgcgcaggatccagtt

SEQ ID NO: 9411 - DNA, 20 bp, Artificial
  Synthetically generated peptide
tcccgcgcaggatccagttg

SEQ ID NO: 9412 - DNA, 20 bp, Artificial
  Synthetically generated peptide
cccgcgcaggatccagttgg

SEQ ID NO: 9413 - DNA, 20 bp, Artificial
  Synthetically generated peptide
ccgcgcaggatccagttggc

SEQ ID NO: 9414 - DNA, 20 bp, Artificial
  Synthetically generated peptide
cgcgcaggatccagttggca

SEQ ID NO: 9415 - DNA, 20 bp, Artificial
  Synthetically generated peptide
gcgcaggatccagttggcag

SEQ ID NO: 9416 - DNA, 20 bp, Artificial
  Synthetically generated peptide
cgcaggatccagttggcagc

SEQ ID NO: 9417 - DNA, 20 bp, Artificial
  Synthetically generated peptide
acgtcccgcgcaggatccag

SEQ ID NO: 9418 - DNA, 20 bp, Artificial
  Synthetically generated peptide
gacgtcccgcgcaggatcca

SEQ ID NO: 9419 - DNA, 20 bp, Artificial
  Synthetically generated peptide
ggacgtcccgcgcaggatcc

SEQ ID NO: 9420 - DNA, 20 bp, Artificial
  Synthetically generated peptide
aggacgtcccgcgcaggatc

SEQ ID NO: 9421 - DNA, 20 bp, Artificial
  Synthetically generated peptide
aaggacgtcccgcgcaggat

SEQ ID NO: 9422 - DNA, 20 bp, Artificial
  Synthetically generated peptide
aaaggacgtcccgcgcagga

SEQ ID NO: 9423 - DNA, 20 bp, Artificial
  Synthetically generated peptide
caaaggacgtcccgcgcagg

SEQ ID NO: 9424 - DNA, 20 bp, Artificial
  Synthetically generated peptide
acaaaggacgtcccgcgcag

SEQ ID NO: 9425 - DNA, 20 bp, Artificial
  Synthetically generated peptide
gacaaaggacgtcccgcgca

SEQ ID NO: 9426 - DNA, 20 bp, Artificial
  Synthetically generated peptide
agacaaaggacgtcccgcgc

SEQ ID NO: 9427 - DNA, 20 bp, Artificial
  Synthetically generated peptide
tagacaaaggacgtcccgcg

SEQ ID NO: 9428 - DNA, 20 bp, Artificial
  Synthetically generated peptide
gtagacaaaggacgtcccgc

SEQ ID NO: 9429 - DNA, 20 bp, Artificial
  Synthetically generated peptide
cgtagacaaaggacgtcccg

SEQ ID NO: 9430 - DNA, 20 bp, Artificial
  Synthetically generated peptide
acgtagacaaaggacgtccc

SEQ ID NO: 9431 - DNA, 20 bp, Artificial
  Synthetically generated peptide
gacgtagacaaaggacgtcc

SEQ ID NO: 9432 - DNA, 26 bp, Artificial
  Synthetically generated peptide
cggctgcgagcaaaacaagctgctag

SEQ ID NO: 9433 - DNA, 20 bp, Artificial
  Synthetically generated peptide
ggctgcgagcaaaacaagct

SEQ ID NO: 9434 - DNA, 20 bp, Artificial
  Synthetically generated peptide
gctgcgagcaaaacaagctg

SEQ ID NO: 9435 - DNA, 20 bp, Artificial
  Synthetically generated peptide
ctgcgagcaaaacaagctgc

SEQ ID NO: 9436 - DNA, 20 bp, Artificial
  Synthetically generated peptide
tgcgagcaaaacaagctgct

SEQ ID NO: 9437 - DNA, 20 bp, Artificial
  Synthetically generated peptide
gcgagcaaaacaagctgcta

SEQ ID NO: 9438 - DNA, 20 bp, Artificial
  Synthetically generated peptide
cgagcaaaacaagctgctag

SEQ ID NO: 9439 - DNA, 20 bp, Artificial
  Synthetically generated peptide
ccggctgcgagcaaaacaag

SEQ ID NO: 9440 - DNA, 20 bp, Artificial
  Synthetically generated peptide
accggctgcgagcaaaacaa

SEQ ID NO: 9441 - DNA, 20 bp, Artificial
  Synthetically generated peptide
gaccggctgcgagcaaaaca

SEQ ID NO: 9442 - DNA, 20 bp, Artificial
  Synthetically generated peptide
agaccggctgcgagcaaaac

SEQ ID NO: 9443 - DNA, 20 bp, Artificial
  Synthetically generated peptide
cagaccggctgcgagcaaaa

SEQ ID NO: 9444 - DNA, 20 bp, Artificial
  Synthetically generated peptide
ccagaccggctgcgagcaaa

SEQ ID NO: 9445 - DNA, 20 bp, Artificial
  Synthetically generated peptide
tccagaccggctgcgagcaa

SEQ ID NO: 9446 - DNA, 20 bp, Artificial
  Synthetically generated peptide
ctccagaccggctgcgagca

SEQ ID NO: 9447 - DNA, 20 bp, Artificial
  Synthetically generated peptide
gctccagaccggctgcgagc

SEQ ID NO: 9448 - DNA, 20 bp, Artificial
  Synthetically generated peptide
cgctccagaccggctgcgag

SEQ ID NO: 9449 - DNA, 20 bp, Artificial
  Synthetically generated peptide
tcgctccagaccggctgcga

SEQ ID NO: 9450 - DNA, 20 bp, Artificial
  Synthetically generated peptide
ttcgctccagaccggctgcg

SEQ ID NO: 9451 - DNA, 20 bp, Artificial
  Synthetically generated peptide
tttcgctccagaccggctgc

SEQ ID NO: 9452 - DNA, 20 bp, Artificial
  Synthetically generated peptide
gtttcgctccagaccggctg

SEQ ID NO: 9453 - DNA, 20 bp, Artificial
  Synthetically generated peptide
agtttcgctccagaccggct

SEQ ID NO: 9454 - DNA, 20 bp, Artificial
  Synthetically generated peptide
aagtttcgctccagaccggc

SEQ ID NO: 9455 - DNA, 20 bp, Artificial
  Synthetically generated peptide
taagtttcgctccagaccgg

SEQ ID NO: 9456 - DNA, 20 bp, Artificial
  Synthetically generated peptide
ataagtttcgctccagaccg

SEQ ID NO: 9457 - DNA, 20 bp, Artificial
  Synthetically generated peptide
gataagtttcgctccagacc

SEQ ID NO: 9458 - DNA, 20 bp, Artificial
  Synthetically generated peptide
cgataagtttcgctccagac

SEQ ID NO: 9459 - DNA, 20 bp, Artificial
  Synthetically generated peptide
ccgataagtttcgctccaga

SEQ ID NO: 9460 - DNA, 20 bp, Artificial
  Synthetically generated peptide
tccgataagtttcgctccag

SEQ ID NO: 9461 - DNA, 20 bp, Artificial
  Synthetically generated peptide
ttccgataagtttcgctcca

SEQ ID NO: 9462 - DNA, 20 bp, Artificial
  Synthetically generated peptide
gttccgataagtttcgctcc

SEQ ID NO: 9463 - DNA, 20 bp, Artificial
  Synthetically generated peptide
ggttccgataagtttcgctc

SEQ ID NO: 9464 - DNA, 20 bp, Artificial
  Synthetically generated peptide
cggttccgataagtttcgct

SEQ ID NO: 9465 - DNA, 20 bp, Artificial
  Synthetically generated peptide
tcggttccgataagtttcgc

SEQ ID NO: 9466 - DNA, 20 bp, Artificial
  Synthetically generated peptide
gtcggttccgataagtttcg

SEQ ID NO: 9467 - DNA, 20 bp, Artificial
  Synthetically generated peptide
tgtcggttccgataagtttc

SEQ ID NO: 9468 - DNA, 26 bp, Artificial
  Synthetically generated peptide
cgcatgcgccgatggcctatggccaa

SEQ ID NO: 9469 - DNA, 20 bp, Artificial
  Synthetically generated peptide
gcatgcgccgatggcctatg

SEQ ID NO: 9470 - DNA, 20 bp, Artificial
  Synthetically generated peptide
catgcgccgatggcctatgg

SEQ ID NO: 9471 - DNA, 20 bp, Artificial
  Synthetically generated peptide
atgcgccgatggcctatggc

SEQ ID NO: 9472 - DNA, 20 bp, Artificial
  Synthetically generated peptide
tgcgccgatggcctatggcc

SEQ ID NO: 9473 - DNA, 20 bp, Artificial
  Synthetically generated peptide
gcgccgatggcctatggcca

SEQ ID NO: 9474 - DNA, 20 bp, Artificial
  Synthetically generated peptide
cgccgatggcctatggccaa

SEQ ID NO: 9475 - DNA, 20 bp, Artificial
  Synthetically generated peptide
gccgatggcctatggccaag

SEQ ID NO: 9476 - DNA, 20 bp, Artificial
  Synthetically generated peptide
ccgatggcctatggccaagc

SEQ ID NO: 9477 - DNA, 20 bp, Artificial
  Synthetically generated peptide
cgatggcctatggccaagcc

SEQ ID NO: 9478 - DNA, 20 bp, Artificial
  Synthetically generated peptide
acgcatgcgccgatggccta

SEQ ID NO: 9479 - DNA, 20 bp, Artificial
  Synthetically generated peptide
cacgcatgcgccgatggcct

SEQ ID NO: 9480 - DNA, 20 bp, Artificial
  Synthetically generated peptide
ccacgcatgcgccgatggcc

SEQ ID NO: 9481 - DNA, 20 bp, Artificial
  Synthetically generated peptide
tccacgcatgcgccgatggc

SEQ ID NO: 9482 - DNA, 20 bp, Artificial
  Synthetically generated peptide
ttccacgcatgcgccgatgg

SEQ ID NO: 9483 - DNA, 20 bp, Artificial
  Synthetically generated peptide
gttccacgcatgcgccgatg

SEQ ID NO: 9484 - DNA, 20 bp, Artificial
  Synthetically generated peptide
ggttccacgcatgcgccgat

SEQ ID NO: 9485 - DNA, 20 bp, Artificial
  Synthetically generated peptide
aggttccacgcatgcgccga

SEQ ID NO: 9486 - DNA, 20 bp, Artificial
  Synthetically generated peptide
aaggttccacgcatgcgccg

SEQ ID NO: 9487 - DNA, 20 bp, Artificial
  Synthetically generated peptide
aaaggttccacgcatgcgcc

SEQ ID NO: 9488 - DNA, 20 bp, Artificial
  Synthetically generated peptide
caaaggttccacgcatgcgc

SEQ ID NO: 9489 - DNA, 20 bp, Artificial
  Synthetically generated peptide
acaaaggttccacgcatgcg

SEQ ID NO: 9490 - DNA, 20 bp, Artificial
  Synthetically generated peptide
cacaaaggttccacgcatgc

SEQ ID NO: 9491 - DNA, 20 bp, Artificial
  Synthetically generated peptide
ccacaaaggttccacgcatg

SEQ ID NO: 9492 - DNA, 20 bp, Artificial
  Synthetically generated peptide
gccacaaaggttccacgcat

SEQ ID NO: 9493 - DNA, 20 bp, Artificial
  Synthetically generated peptide
agccacaaaggttccacgca

SEQ ID NO: 9494 - DNA, 20 bp, Artificial
  Synthetically generated peptide
gagccacaaaggttccacgc

SEQ ID NO: 9495 - DNA, 20 bp, Artificial
  Synthetically generated peptide
ggagccacaaaggttccacg

SEQ ID NO: 9496 - DNA, 23 bp, Artificial
  Synthetically generated peptide
cgccgcagacacatccagcgata

SEQ ID NO: 9497 - DNA, 20 bp, Artificial
  Synthetically generated peptide
gccgcagacacatccagcga

SEQ ID NO: 9498 - DNA, 20 bp, Artificial
  Synthetically generated peptide
ccgcagacacatccagcgat

SEQ ID NO: 9499 - DNA, 20 bp, Artificial
  Synthetically generated peptide
cgcagacacatccagcgata

SEQ ID NO: 9500 - DNA, 20 bp, Artificial
  Synthetically generated peptide
gcagacacatccagcgatag

SEQ ID NO: 9501 - DNA, 20 bp, Artificial
  Synthetically generated peptide
cagacacatccagcgatagc

SEQ ID NO: 9502 - DNA, 20 bp, Artificial
  Synthetically generated peptide
agacacatccagcgatagcc

SEQ ID NO: 9503 - DNA, 20 bp, Artificial
  Synthetically generated peptide
gacacatccagcgatagcca

SEQ ID NO: 9504 - DNA, 20 bp, Artificial
  Synthetically generated peptide
acacatccagcgatagccag

SEQ ID NO: 9505 - DNA, 20 bp, Artificial
  Synthetically generated peptide
cacatccagcgatagccagg

SEQ ID NO: 9506 - DNA, 20 bp, Artificial
  Synthetically generated peptide
acatccagcgatagccagga

SEQ ID NO: 9507 - DNA, 20 bp, Artificial
  Synthetically generated peptide
catccagcgatagccaggac

SEQ ID NO: 9508 - DNA, 20 bp, Artificial
  Synthetically generated peptide
atccagcgatagccaggaca

SEQ ID NO: 9509 - DNA, 20 bp, Artificial
  Synthetically generated peptide
tccagcgatagccaggacaa

SEQ ID NO: 9510 - DNA, 20 bp, Artificial
  Synthetically generated peptide
ccagcgatagccaggacaag

SEQ ID NO: 9511 - DNA, 20 bp, Artificial
  Synthetically generated peptide
cagcgatagccaggacaagt

SEQ ID NO: 9512 - DNA, 20 bp, Artificial
  Synthetically generated peptide
agcgatagccaggacaagtt

SEQ ID NO: 9513 - DNA, 20 bp, Artificial
  Synthetically generated peptide
gcgatagccaggacaagttg

SEQ ID NO: 9514 - DNA, 20 bp, Artificial
  Synthetically generated peptide
cgatagccaggacaagttgg

SEQ ID NO: 9515 - DNA, 20 bp, Artificial
  Synthetically generated peptide
acgccgcagacacatccagc

SEQ ID NO: 9516 - DNA, 20 bp, Artificial
  Synthetically generated peptide
aacgccgcagacacatccag

SEQ ID NO: 9517 - DNA, 20 bp, Artificial
  Synthetically generated peptide
aaacgccgcagacacatcca

SEQ ID NO: 9518 - DNA, 20 bp, Artificial
  Synthetically generated peptide
aaaacgccgcagacacatcc

SEQ ID NO: 9519 - DNA, 20 bp, Artificial
  Synthetically generated peptide
taaaacgccgcagacacatc

SEQ ID NO: 9520 - DNA, 20 bp, Artificial
  Synthetically generated peptide
ataaaacgccgcagacacat

SEQ ID NO: 9521 - DNA, 20 bp, Artificial
  Synthetically generated peptide
gataaaacgccgcagacaca

SEQ ID NO: 9522 - DNA, 20 bp, Artificial
  Synthetically generated peptide
tgataaaacgccgcagacac

SEQ ID NO: 9523 - DNA, 20 bp, Artificial
  Synthetically generated peptide
atgataaaacgccgcagaca

SEQ ID NO: 9524 - DNA, 20 bp, Artificial
  Synthetically generated peptide
tatgataaaacgccgcagac

SEQ ID NO: 9525 - DNA, 18 bp, Artificial
  Synthetically generated peptide
gctccagaccggctgcga

SEQ ID NO: 9526 - DNA, 20 bp, Artificial
  Synthetically generated peptide
ctccagaccggctgcgagca

SEQ ID NO: 9527 - DNA, 20 bp, Artificial
  Synthetically generated peptide
tccagaccggctgcgagcaa

SEQ ID NO: 9528 - DNA, 20 bp, Artificial
  Synthetically generated peptide
ccagaccggctgcgagcaaa

SEQ ID NO: 9529 - DNA, 20 bp, Artificial
  Synthetically generated peptide
cagaccggctgcgagcaaaa

SEQ ID NO: 9530 - DNA, 20 bp, Artificial
  Synthetically generated peptide
agaccggctgcgagcaaaac

SEQ ID NO: 9531 - DNA, 20 bp, Artificial
  Synthetically generated peptide
gaccggctgcgagcaaaaca

SEQ ID NO: 9532 - DNA, 20 bp, Artificial
  Synthetically generated peptide
accggctgcgagcaaaacaa

SEQ ID NO: 9533 - DNA, 20 bp, Artificial
  Synthetically generated peptide
ccggctgcgagcaaaacaag

SEQ ID NO: 9534 - DNA, 20 bp, Artificial
  Synthetically generated peptide
cggctgcgagcaaaacaagc

SEQ ID NO: 9535 - DNA, 20 bp, Artificial
  Synthetically generated peptide
ggctgcgagcaaaacaagct

SEQ ID NO: 9536 - DNA, 20 bp, Artificial
  Synthetically generated peptide
gctgcgagcaaaacaagctg

SEQ ID NO: 9537 - DNA, 20 bp, Artificial
  Synthetically generated peptide
ctgcgagcaaaacaagctgc

SEQ ID NO: 9538 - DNA, 20 bp, Artificial
  Synthetically generated peptide
tgcgagcaaaacaagctgct

SEQ ID NO: 9539 - DNA, 20 bp, Artificial
  Synthetically generated peptide
gcgagcaaaacaagctgcta

SEQ ID NO: 9540 - DNA, 20 bp, Artificial
  Synthetically generated peptide
cgagcaaaacaagctgctag

SEQ ID NO: 9541 - DNA, 20 bp, Artificial
  Synthetically generated peptide
cgctccagaccggctgcgag

SEQ ID NO: 9542 - DNA, 20 bp, Artificial
  Synthetically generated peptide
tcgctccagaccggctgcga

SEQ ID NO: 9543 - DNA, 20 bp, Artificial
  Synthetically generated peptide
ttcgctccagaccggctgcg

SEQ ID NO: 9544 - DNA, 20 bp, Artificial
  Synthetically generated peptide
tttcgctccagaccggctgc

SEQ ID NO: 9545 - DNA, 20 bp, Artificial
  Synthetically generated peptide
gtttcgctccagaccggctg

SEQ ID NO: 9546 - DNA, 20 bp, Artificial
  Synthetically generated peptide
agtttcgctccagaccggct

SEQ ID NO: 9547 - DNA, 20 bp, Artificial
  Synthetically generated peptide
aagtttcgctccagaccggc

SEQ ID NO: 9548 - DNA, 20 bp, Artificial
  Synthetically generated peptide
taagtttcgctccagaccgg

SEQ ID NO: 9549 - DNA, 20 bp, Artificial
  Synthetically generated peptide
ataagtttcgctccagaccg

SEQ ID NO: 9550 - DNA, 20 bp, Artificial
  Synthetically generated peptide
gataagtttcgctccagacc

SEQ ID NO: 9551 - DNA, 20 bp, Artificial
  Synthetically generated peptide
cgataagtttcgctccagac

SEQ ID NO: 9552 - DNA, 20 bp, Artificial
  Synthetically generated peptide
ccgataagtttcgctccaga

SEQ ID NO: 9553 - DNA, 20 bp, Artificial
  Synthetically generated peptide
tccgataagtttcgctccag

SEQ ID NO: 9554 - DNA, 20 bp, Artificial
  Synthetically generated peptide
ttccgataagtttcgctcca

SEQ ID NO: 9555 - DNA, 20 bp, Artificial
  Synthetically generated peptide
gttccgataagtttcgctcc

SEQ ID NO: 9556 - DNA, 20 bp, Artificial
  Synthetically generated peptide
ggttccgataagtttcgctc

SEQ ID NO: 9557 - DNA, 20 bp, Artificial
  Synthetically generated peptide
cggttccgataagtttcgct

SEQ ID NO: 9558 - DNA, 20 bp, Artificial
  Synthetically generated peptide
tcggttccgataagtttcgc

SEQ ID NO: 9559 - DNA, 20 bp, Artificial
  Synthetically generated peptide
gtcggttccgataagtttcg

SEQ ID NO: 9560 - DNA, 20 bp, Artificial
  Synthetically generated peptide
tgtcggttccgataagtttc

SEQ ID NO: 9561 - DNA, 23 bp, Artificial
  Synthetically generated peptide
cgtccatcgcaggatccagttgg

SEQ ID NO: 9562 - DNA, 23 bp, Artificial
  Synthetically generated peptide
cgccgcagacacatccagcgata

SEQ ID NO: 9563 - DNA, 20 bp, Artificial
  Synthetically generated peptide
gccgcagacacatccagcga

SEQ ID NO: 9564 - DNA, 20 bp, Artificial
  Synthetically generated peptide
ccgcagacacatccagcgat

SEQ ID NO: 9565 - DNA, 20 bp, Artificial
  Synthetically generated peptide
cgcagacacatccagcgata

SEQ ID NO: 9566 - DNA, 20 bp, Artificial
  Synthetically generated peptide
gcagacacatccagcgatag

SEQ ID NO: 9567 - DNA, 20 bp, Artificial
  Synthetically generated peptide
cagacacatccagcgatagc

SEQ ID NO: 9568 - DNA, 20 bp, Artificial
  Synthetically generated peptide
agacacatccagcgatagcc

SEQ ID NO: 9569 - DNA, 20 bp, Artificial
  Synthetically generated peptide
gacacatccagcgatagcca

SEQ ID NO: 9570 - DNA, 20 bp, Artificial
  Synthetically generated peptide
acacatccagcgatagccag

SEQ ID NO: 9571 - DNA, 20 bp, Artificial
  Synthetically generated peptide
cacatccagcgatagccagg

SEQ ID NO: 9572 - DNA, 20 bp, Artificial
  Synthetically generated peptide
acatccagcgatagccagga

SEQ ID NO: 9573 - DNA, 20 bp, Artificial
  Synthetically generated peptide
catccagcgatagccaggac

SEQ ID NO: 9574 - DNA, 20 bp, Artificial
  Synthetically generated peptide
atccagcgatagccaggaca

SEQ ID NO: 9575 - DNA, 20 bp, Artificial
  Synthetically generated peptide
tccagcgatagccaggacaa

SEQ ID NO: 9576 - DNA, 20 bp, Artificial
  Synthetically generated peptide
ccagcgatagccaggacaag

SEQ ID NO: 9577 - DNA, 20 bp, Artificial
  Synthetically generated peptide
cagcgatagccaggacaagt

SEQ ID NO: 9578 - DNA, 20 bp, Artificial
  Synthetically generated peptide
agcgatagccaggacaagtt

SEQ ID NO: 9579 - DNA, 20 bp, Artificial
  Synthetically generated peptide
gcgatagccaggacaagttg

SEQ ID NO: 9580 - DNA, 20 bp, Artificial
  Synthetically generated peptide
cgatagccaggacaagttgg

SEQ ID NO: 9581 - DNA, 20 bp, Artificial
  Synthetically generated peptide
acgccgcagacacatccagc

SEQ ID NO: 9582 - DNA, 20 bp, Artificial
  Synthetically generated peptide
aacgccgcagacacatccag

SEQ ID NO: 9583 - DNA, 20 bp, Artificial
  Synthetically generated peptide
aaacgccgcagacacatcca

SEQ ID NO: 9584 - DNA, 20 bp, Artificial
  Synthetically generated peptide
aaaacgccgcagacacatcc

SEQ ID NO: 9585 - DNA, 20 bp, Artificial
  Synthetically generated peptide
taaaacgccgcagacacatc

SEQ ID NO: 9586 - DNA, 20 bp, Artificial
  Synthetically generated peptide
ataaaacgccgcagacacat

SEQ ID NO: 9587 - DNA, 20 bp, Artificial
  Synthetically generated peptide
gataaaacgccgcagacaca

SEQ ID NO: 9588 - DNA, 20 bp, Artificial
  Synthetically generated peptide
tgataaaacgccgcagacac

SEQ ID NO: 9589 - DNA, 20 bp, Artificial
  Synthetically generated peptide
atgataaaacgccgcagaca

SEQ ID NO: 9590 - DNA, 20 bp, Artificial
  Synthetically generated peptide
tatgataaaacgccgcagac

SEQ ID NO: 9591 - DNA, 22 bp, Artificial
  Synthetically generated peptide
caaatggcactagtaaactgag

SEQ ID NO: 9592 - DNA, 25 bp, Artificial
  Synthetically generated peptide
gagattgagatctgcggcgacgcgg

SEQ ID NO: 9593 - DNA, 27 bp, Artificial
  Synthetically generated peptide
cgacgcggcgattgagatcttcgtctg

SEQ ID NO: 9594 - DNA, 27 bp, Artificial
  Synthetically generated peptide
aggggtcgtccgcgggattcagcgccg

SEQ ID NO: 9595 - DNA, 27 bp, Artificial
  Synthetically generated peptide
ccgccaaagctccggaagcccgacgcc

SEQ ID NO: 9596 - DNA, 20 bp, Artificial
  Synthetically generated peptide
cgccaaagctccggaagccc

SEQ ID NO: 9597 - DNA, 20 bp, Artificial
  Synthetically generated peptide
gccaaagctccggaagcccg

SEQ ID NO: 9598 - DNA, 20 bp, Artificial
  Synthetically generated peptide
ccaaagctccggaagcccga

SEQ ID NO: 9599 - DNA, 20 bp, Artificial
  Synthetically generated peptide
caaagctccggaagcccgac

SEQ ID NO: 9600 - DNA, 20 bp, Artificial
  Synthetically generated peptide
aaagctccggaagcccgacg

SEQ ID NO: 9601 - DNA, 20 bp, Artificial
  Synthetically generated peptide
aagctccggaagcccgacgc

SEQ ID NO: 9602 - DNA, 20 bp, Artificial
  Synthetically generated peptide
agctccggaagcccgacgcc

SEQ ID NO: 9603 - DNA, 20 bp, Artificial
  Synthetically generated peptide
gctccggaagcccgacgcca

SEQ ID NO: 9604 - DNA, 20 bp, Artificial
  Synthetically generated peptide
ctccggaagcccgacgccac

SEQ ID NO: 9605 - DNA, 20 bp, Artificial
  Synthetically generated peptide
tccggaagcccgacgccacg

SEQ ID NO: 9606 - DNA, 20 bp, Artificial
  Synthetically generated peptide
ccggaagcccgacgccacga

SEQ ID NO: 9607 - DNA, 20 bp, Artificial
  Synthetically generated peptide
cggaagcccgacgccacgac

SEQ ID NO: 9608 - DNA, 20 bp, Artificial
  Synthetically generated peptide
ggaagcccgacgccacgacc

SEQ ID NO: 9609 - DNA, 20 bp, Artificial
  Synthetically generated peptide
gaagcccgacgccacgacct

SEQ ID NO: 9610 - DNA, 20 bp, Artificial
  Synthetically generated peptide
aagcccgacgccacgaccta

SEQ ID NO: 9611 - DNA, 20 bp, Artificial
  Synthetically generated peptide
agcccgacgccacgacctag

SEQ ID NO: 9612 - DNA, 20 bp, Artificial
  Synthetically generated peptide
gcccgacgccacgacctaga

SEQ ID NO: 9613 - DNA, 20 bp, Artificial
  Synthetically generated peptide
cccgacgccacgacctagaa

SEQ ID NO: 9614 - DNA, 20 bp, Artificial
  Synthetically generated peptide
ccgacgccacgacctagaaa

SEQ ID NO: 9615 - DNA, 20 bp, Artificial
  Synthetically generated peptide
cgacgccacgacctagaaac

SEQ ID NO: 9616 - DNA, 20 bp, Artificial
  Synthetically generated peptide
gacgccacgacctagaaaca

SEQ ID NO: 9617 - DNA, 20 bp, Artificial
  Synthetically generated peptide
acgccacgacctagaaacac

SEQ ID NO: 9618 - DNA, 20 bp, Artificial
  Synthetically generated peptide
cgccacgacctagaaacacg

SEQ ID NO: 9619 - DNA, 20 bp, Artificial
  Synthetically generated peptide
gccacgacctagaaacacgc

SEQ ID NO: 9620 - DNA, 20 bp, Artificial
  Synthetically generated peptide
ccacgacctagaaacacgct

SEQ ID NO: 9621 - DNA, 20 bp, Artificial
  Synthetically generated peptide
cacgacctagaaacacgctg

SEQ ID NO: 9622 - DNA, 20 bp, Artificial
  Synthetically generated peptide
acgacctagaaacacgctgc

SEQ ID NO: 9623 - DNA, 20 bp, Artificial
  Synthetically generated peptide
cgacctagaaacacgctgcc

SEQ ID NO: 9624 - DNA, 20 bp, Artificial
  Synthetically generated peptide
gacctagaaacacgctgccg

SEQ ID NO: 9625 - DNA, 20 bp, Artificial
  Synthetically generated peptide
acctagaaacacgctgccgc

SEQ ID NO: 9626 - DNA, 20 bp, Artificial
  Synthetically generated peptide
cctagaaacacgctgccgcc

SEQ ID NO: 9627 - DNA, 20 bp, Artificial
  Synthetically generated peptide
ctagaaacacgctgccgcct

SEQ ID NO: 9628 - DNA, 20 bp, Artificial
  Synthetically generated peptide
tagaaacacgctgccgcctc

SEQ ID NO: 9629 - DNA, 20 bp, Artificial
  Synthetically generated peptide
agaaacacgctgccgcctcg

SEQ ID NO: 9630 - DNA, 20 bp, Artificial
  Synthetically generated peptide
gaaacacgctgccgcctcgc

SEQ ID NO: 9631 - DNA, 20 bp, Artificial
  Synthetically generated peptide
aaacacgctgccgcctcgcc

SEQ ID NO: 9632 - DNA, 20 bp, Artificial
  Synthetically generated peptide
aacacgctgccgcctcgccg

SEQ ID NO: 9633 - DNA, 20 bp, Artificial
  Synthetically generated peptide
acacgctgccgcctcgccgc

SEQ ID NO: 9634 - DNA, 20 bp, Artificial
  Synthetically generated peptide
cacgctgccgcctcgccgcc

SEQ ID NO: 9635 - DNA, 20 bp, Artificial
  Synthetically generated peptide
acgctgccgcctcgccgcct

SEQ ID NO: 9636 - DNA, 20 bp, Artificial
  Synthetically generated peptide
cgctgccgcctcgccgcctc

SEQ ID NO: 9637 - DNA, 20 bp, Artificial
  Synthetically generated peptide
gctgccgcctcgccgcctcg

SEQ ID NO: 9638 - DNA, 20 bp, Artificial
  Synthetically generated peptide
ctgccgcctcgccgcctcgc

SEQ ID NO: 9639 - DNA, 20 bp, Artificial
  Synthetically generated peptide
tgccgcctcgccgcctcgcg

SEQ ID NO: 9640 - DNA, 20 bp, Artificial
  Synthetically generated peptide
gccgcctcgccgcctcgcgt

SEQ ID NO: 9641 - DNA, 20 bp, Artificial
  Synthetically generated peptide
ccgcctcgccgcctcgcgtg

SEQ ID NO: 9642 - DNA, 20 bp, Artificial
  Synthetically generated peptide
cgcctcgccgcctcgcgtgc

SEQ ID NO: 9643 - DNA, 20 bp, Artificial
  Synthetically generated peptide
gcctcgccgcctcgcgtgcg

SEQ ID NO: 9644 - DNA, 20 bp, Artificial
  Synthetically generated peptide
cctcgccgcctcgcgtgcgc

SEQ ID NO: 9645 - DNA, 20 bp, Artificial
  Synthetically generated peptide
ctcgccgcctcgcgtgcgct

SEQ ID NO: 9646 - DNA, 20 bp, Artificial
  Synthetically generated peptide
tcgccgcctcgcgtgcgctc

SEQ ID NO: 9647 - DNA, 20 bp, Artificial
  Synthetically generated peptide
cgccgcctcgcgtgcgctca

SEQ ID NO: 9648 - DNA, 20 bp, Artificial
  Synthetically generated peptide
gccgcctcgcgtgcgctcac

SEQ ID NO: 9649 - DNA, 20 bp, Artificial
  Synthetically generated peptide
ccgcctcgcgtgcgctcacc

SEQ ID NO: 9650 - DNA, 20 bp, Artificial
  Synthetically generated peptide
cgcctcgcgtgcgctcaccc

SEQ ID NO: 9651 - DNA, 20 bp, Artificial
  Synthetically generated peptide
gcctcgcgtgcgctcaccca

SEQ ID NO: 9652 - DNA, 20 bp, Artificial
  Synthetically generated peptide
cctcgcgtgcgctcacccag

SEQ ID NO: 9653 - DNA, 20 bp, Artificial
  Synthetically generated peptide
ctcgcgtgcgctcacccagc

SEQ ID NO: 9654 - DNA, 20 bp, Artificial
  Synthetically generated peptide
tcgcgtgcgctcacccagcc

SEQ ID NO: 9655 - DNA, 20 bp, Artificial
  Synthetically generated peptide
cgcgtgcgctcacccagccg

SEQ ID NO: 9656 - DNA, 20 bp, Artificial
  Synthetically generated peptide
gcgtgcgctcacccagccgc

SEQ ID NO: 9657 - DNA, 20 bp, Artificial
  Synthetically generated peptide
cgtgcgctcacccagccgca

SEQ ID NO: 9658 - DNA, 20 bp, Artificial
  Synthetically generated peptide
gtgcgctcacccagccgcag

SEQ ID NO: 9659 - DNA, 20 bp, Artificial
  Synthetically generated peptide
tgcgctcacccagccgcagg

SEQ ID NO: 9660 - DNA, 20 bp, Artificial
  Synthetically generated peptide
gcgctcacccagccgcaggc

SEQ ID NO: 9661 - DNA, 20 bp, Artificial
  Synthetically generated peptide
cgctcacccagccgcaggcg

SEQ ID NO: 9662 - DNA, 20 bp, Artificial
  Synthetically generated peptide
gctcacccagccgcaggcgc

SEQ ID NO: 9663 - DNA, 20 bp, Artificial
  Synthetically generated peptide
ctcacccagccgcaggcgcc

SEQ ID NO: 9664 - DNA, 20 bp, Artificial
  Synthetically generated peptide
tcacccagccgcaggcgcct

SEQ ID NO: 9665 - DNA, 20 bp, Artificial
  Synthetically generated peptide
cacccagccgcaggcgcctg

SEQ ID NO: 9666 - DNA, 20 bp, Artificial
  Synthetically generated peptide
acccagccgcaggcgcctga

SEQ ID NO: 9667 - DNA, 20 bp, Artificial
  Synthetically generated peptide
cccagccgcaggcgcctgag

SEQ ID NO: 9668 - DNA, 20 bp, Artificial
  Synthetically generated peptide
ccagccgcaggcgcctgagc

SEQ ID NO: 9669 - DNA, 20 bp, Artificial
  Synthetically generated peptide
cagccgcaggcgcctgagcg

SEQ ID NO: 9670 - DNA, 20 bp, Artificial
  Synthetically generated peptide
agccgcaggcgcctgagcgg

SEQ ID NO: 9671 - DNA, 20 bp, Artificial
  Synthetically generated peptide
gccgcaggcgcctgagcggc

SEQ ID NO: 9672 - DNA, 20 bp, Artificial
  Synthetically generated peptide
ccgcaggcgcctgagcggcc

SEQ ID NO: 9673 - DNA, 20 bp, Artificial
  Synthetically generated peptide
cgcaggcgcctgagcggcca

SEQ ID NO: 9674 - DNA, 20 bp, Artificial
  Synthetically generated peptide
gcaggcgcctgagcggccag

SEQ ID NO: 9675 - DNA, 20 bp, Artificial
  Synthetically generated peptide
caggcgcctgagcggccaga

SEQ ID NO: 9676 - DNA, 20 bp, Artificial
  Synthetically generated peptide
aggcgcctgagcggccagag

SEQ ID NO: 9677 - DNA, 20 bp, Artificial
  Synthetically generated peptide
ggcgcctgagcggccagagc

SEQ ID NO: 9678 - DNA, 20 bp, Artificial
  Synthetically generated peptide
gcgcctgagcggccagagcc

SEQ ID NO: 9679 - DNA, 20 bp, Artificial
  Synthetically generated peptide
cgcctgagcggccagagccg

SEQ ID NO: 9680 - DNA, 20 bp, Artificial
  Synthetically generated peptide
gcctgagcggccagagccgc

SEQ ID NO: 9681 - DNA, 20 bp, Artificial
  Synthetically generated peptide
cctgagcggccagagccgcc

SEQ ID NO: 9682 - DNA, 20 bp, Artificial
  Synthetically generated peptide
ctgagcggccagagccgcca

SEQ ID NO: 9683 - DNA, 20 bp, Artificial
  Synthetically generated peptide
tgagcggccagagccgccac

SEQ ID NO: 9684 - DNA, 20 bp, Artificial
  Synthetically generated peptide
gagcggccagagccgccacc

SEQ ID NO: 9685 - DNA, 20 bp, Artificial
  Synthetically generated peptide
agcggccagagccgccaccg

SEQ ID NO: 9686 - DNA, 20 bp, Artificial
  Synthetically generated peptide
gcggccagagccgccaccga

SEQ ID NO: 9687 - DNA, 20 bp, Artificial
  Synthetically generated peptide
cggccagagccgccaccgaa

SEQ ID NO: 9688 - DNA, 20 bp, Artificial
  Synthetically generated peptide
ggccagagccgccaccgaac

SEQ ID NO: 9689 - DNA, 20 bp, Artificial
  Synthetically generated peptide
gccagagccgccaccgaaca

SEQ ID NO: 9690 - DNA, 20 bp, Artificial
  Synthetically generated peptide
ccagagccgccaccgaacac

SEQ ID NO: 9691 - DNA, 20 bp, Artificial
  Synthetically generated peptide
cagagccgccaccgaacacg

SEQ ID NO: 9692 - DNA, 20 bp, Artificial
  Synthetically generated peptide
agagccgccaccgaacacgc

SEQ ID NO: 9693 - DNA, 20 bp, Artificial
  Synthetically generated peptide
gagccgccaccgaacacgcc

SEQ ID NO: 9694 - DNA, 20 bp, Artificial
  Synthetically generated peptide
agccgccaccgaacacgccg

SEQ ID NO: 9695 - DNA, 20 bp, Artificial
  Synthetically generated peptide
gccgccaccgaacacgccgc

SEQ ID NO: 9696 - DNA, 20 bp, Artificial
  Synthetically generated peptide
ccgccaccgaacacgccgca

SEQ ID NO: 9697 - DNA, 20 bp, Artificial
  Synthetically generated peptide
cgccaccgaacacgccgcac

SEQ ID NO: 9698 - DNA, 20 bp, Artificial
  Synthetically generated peptide
gccaccgaacacgccgcacc

SEQ ID NO: 9699 - DNA, 20 bp, Artificial
  Synthetically generated peptide
ccaccgaacacgccgcaccg

SEQ ID NO: 9700 - DNA, 20 bp, Artificial
  Synthetically generated peptide
caccgaacacgccgcaccgg

SEQ ID NO: 9701 - DNA, 20 bp, Artificial
  Synthetically generated peptide
accgaacacgccgcaccggc

SEQ ID NO: 9702 - DNA, 20 bp, Artificial
  Synthetically generated peptide
ccgaacacgccgcaccggcc

SEQ ID NO: 9703 - DNA, 20 bp, Artificial
  Synthetically generated peptide
cgaacacgccgcaccggcca

SEQ ID NO: 9704 - DNA, 20 bp, Artificial
  Synthetically generated peptide
gaacacgccgcaccggccac

SEQ ID NO: 9705 - DNA, 20 bp, Artificial
  Synthetically generated peptide
aacacgccgcaccggccacc

SEQ ID NO: 9706 - DNA, 20 bp, Artificial
  Synthetically generated peptide
acacgccgcaccggccaccg

SEQ ID NO: 9707 - DNA, 20 bp, Artificial
  Synthetically generated peptide
cacgccgcaccggccaccgc

SEQ ID NO: 9708 - DNA, 20 bp, Artificial
  Synthetically generated peptide
acgccgcaccggccaccgcc

SEQ ID NO: 9709 - DNA, 20 bp, Artificial
  Synthetically generated peptide
cgccgcaccggccaccgccg

SEQ ID NO: 9710 - DNA, 20 bp, Artificial
  Synthetically generated peptide
gccgcaccggccaccgccgt

SEQ ID NO: 9711 - DNA, 20 bp, Artificial
  Synthetically generated peptide
ccgcaccggccaccgccgtt

SEQ ID NO: 9712 - DNA, 20 bp, Artificial
  Synthetically generated peptide
cgcaccggccaccgccgttc

SEQ ID NO: 9713 - DNA, 20 bp, Artificial
  Synthetically generated peptide
gcaccggccaccgccgttcc

SEQ ID NO: 9714 - DNA, 20 bp, Artificial
  Synthetically generated peptide
caccggccaccgccgttccc

SEQ ID NO: 9715 - DNA, 20 bp, Artificial
  Synthetically generated peptide
accggccaccgccgttccct

SEQ ID NO: 9716 - DNA, 20 bp, Artificial
  Synthetically generated peptide
ccggccaccgccgttccctg

SEQ ID NO: 9717 - DNA, 20 bp, Artificial
  Synthetically generated peptide
cggccaccgccgttccctga

SEQ ID NO: 9718 - DNA, 20 bp, Artificial
  Synthetically generated peptide
ggccaccgccgttccctgat

SEQ ID NO: 9719 - DNA, 20 bp, Artificial
  Synthetically generated peptide
gccaccgccgttccctgata

SEQ ID NO: 9720 - DNA, 20 bp, Artificial
  Synthetically generated peptide
ccaccgccgttccctgatag

SEQ ID NO: 9721 - DNA, 20 bp, Artificial
  Synthetically generated peptide
caccgccgttccctgataga

SEQ ID NO: 9722 - DNA, 20 bp, Artificial
  Synthetically generated peptide
accgccgttccctgatagat

SEQ ID NO: 9723 - DNA, 20 bp, Artificial
  Synthetically generated peptide
ccgccgttccctgatagatt

SEQ ID NO: 9724 - DNA, 20 bp, Artificial
  Synthetically generated peptide
cgccgttccctgatagattg

SEQ ID NO: 9725 - DNA, 20 bp, Artificial
  Synthetically generated peptide
gccgttccctgatagattgc

SEQ ID NO: 9726 - DNA, 20 bp, Artificial
  Synthetically generated peptide
ccgttccctgatagattgct

SEQ ID NO: 9727 - DNA, 20 bp, Artificial
  Synthetically generated peptide
cgttccctgatagattgctg

SEQ ID NO: 9728 - DNA, 20 bp, Artificial
  Synthetically generated peptide
gccgccaaagctccggaagc

SEQ ID NO: 9729 - DNA, 20 bp, Artificial
  Synthetically generated peptide
tgccgccaaagctccggaag

SEQ ID NO: 9730 - DNA, 20 bp, Artificial
  Synthetically generated peptide
ctgccgccaaagctccggaa

SEQ ID NO: 9731 - DNA, 20 bp, Artificial
  Synthetically generated peptide
gctgccgccaaagctccgga

SEQ ID NO: 9732 - DNA, 20 bp, Artificial
  Synthetically generated peptide
agctgccgccaaagctccgg

SEQ ID NO: 9733 - DNA, 20 bp, Artificial
  Synthetically generated peptide
tagctgccgccaaagctccg

SEQ ID NO: 9734 - DNA, 20 bp, Artificial
  Synthetically generated peptide
ctagctgccgccaaagctcc

SEQ ID NO: 9735 - DNA, 20 bp, Artificial
  Synthetically generated peptide
cctagctgccgccaaagctc

SEQ ID NO: 9736 - DNA, 20 bp, Artificial
  Synthetically generated peptide
ccctagctgccgccaaagct

SEQ ID NO: 9737 - DNA, 20 bp, Artificial
  Synthetically generated peptide
cccctagctgccgccaaagc

SEQ ID NO: 9738 - DNA, 20 bp, Artificial
  Synthetically generated peptide
tcccctagctgccgccaaag

SEQ ID NO: 9739 - DNA, 20 bp, Artificial
  Synthetically generated peptide
ctcccctagctgccgccaaa

SEQ ID NO: 9740 - DNA, 20 bp, Artificial
  Synthetically generated peptide
cctcccctagctgccgccaa

SEQ ID NO: 9741 - DNA, 25 bp, Artificial
  Synthetically generated peptide
ccgcctcgccgcctcgcgtgcgctc

SEQ ID NO: 9742 - DNA, 20 bp, Artificial
  Synthetically generated peptide
cgcctcgccgcctcgcgtgc

SEQ ID NO: 9743 - DNA, 20 bp, Artificial
  Synthetically generated peptide
gcctcgccgcctcgcgtgcg

SEQ ID NO: 9744 - DNA, 20 bp, Artificial
  Synthetically generated peptide
cctcgccgcctcgcgtgcgc

SEQ ID NO: 9745 - DNA, 20 bp, Artificial
  Synthetically generated peptide
ctcgccgcctcgcgtgcgct

SEQ ID NO: 9746 - DNA, 20 bp, Artificial
  Synthetically generated peptide
tcgccgcctcgcgtgcgctc

SEQ ID NO: 9747 - DNA, 20 bp, Artificial
  Synthetically generated peptide
cgccgcctcgcgtgcgctca

SEQ ID NO: 9748 - DNA, 20 bp, Artificial
  Synthetically generated peptide
gccgcctcgcgtgcgctcac

SEQ ID NO: 9749 - DNA, 20 bp, Artificial
  Synthetically generated peptide
ccgcctcgcgtgcgctcacc

SEQ ID NO: 9750 - DNA, 20 bp, Artificial
  Synthetically generated peptide
cgcctcgcgtgcgctcaccc

SEQ ID NO: 9751 - DNA, 20 bp, Artificial
  Synthetically generated peptide
gcctcgcgtgcgctcaccca

SEQ ID NO: 9752 - DNA, 20 bp, Artificial
  Synthetically generated peptide
cctcgcgtgcgctcacccag

SEQ ID NO: 9753 - DNA, 20 bp, Artificial
  Synthetically generated peptide
ctcgcgtgcgctcacccagc

SEQ ID NO: 9754 - DNA, 20 bp, Artificial
  Synthetically generated peptide
tcgcgtgcgctcacccagcc

SEQ ID NO: 9755 - DNA, 20 bp, Artificial
  Synthetically generated peptide
cgcgtgcgctcacccagccg

SEQ ID NO: 9756 - DNA, 20 bp, Artificial
  Synthetically generated peptide
gcgtgcgctcacccagccgc

SEQ ID NO: 9757 - DNA, 20 bp, Artificial
  Synthetically generated peptide
cgtgcgctcacccagccgca

SEQ ID NO: 9758 - DNA, 20 bp, Artificial
  Synthetically generated peptide
gtgcgctcacccagccgcag

SEQ ID NO: 9759 - DNA, 20 bp, Artificial
  Synthetically generated peptide
tgcgctcacccagccgcagg

SEQ ID NO: 9760 - DNA, 20 bp, Artificial
  Synthetically generated peptide
gcgctcacccagccgcaggc

SEQ ID NO: 9761 - DNA, 20 bp, Artificial
  Synthetically generated peptide
cgctcacccagccgcaggcg

SEQ ID NO: 9762 - DNA, 20 bp, Artificial
  Synthetically generated peptide
gctcacccagccgcaggcgc

SEQ ID NO: 9763 - DNA, 20 bp, Artificial
  Synthetically generated peptide
ctcacccagccgcaggcgcc

SEQ ID NO: 9764 - DNA, 20 bp, Artificial
  Synthetically generated peptide
tcacccagccgcaggcgcct

SEQ ID NO: 9765 - DNA, 20 bp, Artificial
  Synthetically generated peptide
cacccagccgcaggcgcctg

SEQ ID NO: 9766 - DNA, 20 bp, Artificial
  Synthetically generated peptide
acccagccgcaggcgcctga

SEQ ID NO: 9767 - DNA, 20 bp, Artificial
  Synthetically generated peptide
cccagccgcaggcgcctgag

SEQ ID NO: 9768 - DNA, 20 bp, Artificial
  Synthetically generated peptide
ccagccgcaggcgcctgagc

SEQ ID NO: 9769 - DNA, 20 bp, Artificial
  Synthetically generated peptide
cagccgcaggcgcctgagcg

SEQ ID NO: 9770 - DNA, 20 bp, Artificial
  Synthetically generated peptide
agccgcaggcgcctgagcgg

SEQ ID NO: 9771 - DNA, 20 bp, Artificial
  Synthetically generated peptide
gccgcaggcgcctgagcggc

SEQ ID NO: 9772 - DNA, 20 bp, Artificial
  Synthetically generated peptide
ccgcaggcgcctgagcggcc

SEQ ID NO: 9773 - DNA, 20 bp, Artificial
  Synthetically generated peptide
cgcaggcgcctgagcggcca

SEQ ID NO: 9774 - DNA, 20 bp, Artificial
  Synthetically generated peptide
gcaggcgcctgagcggccag

SEQ ID NO: 9775 - DNA, 20 bp, Artificial
  Synthetically generated peptide
caggcgcctgagcggccaga

SEQ ID NO: 9776 - DNA, 20 bp, Artificial
  Synthetically generated peptide
aggcgcctgagcggccagag

SEQ ID NO: 9777 - DNA, 20 bp, Artificial
  Synthetically generated peptide
ggcgcctgagcggccagagc

SEQ ID NO: 9778 - DNA, 20 bp, Artificial
  Synthetically generated peptide
gcgcctgagcggccagagcc

SEQ ID NO: 9779 - DNA, 20 bp, Artificial
  Synthetically generated peptide
cgcctgagcggccagagccg

SEQ ID NO: 9780 - DNA, 20 bp, Artificial
  Synthetically generated peptide
gcctgagcggccagagccgc

SEQ ID NO: 9781 - DNA, 20 bp, Artificial
  Synthetically generated peptide
cctgagcggccagagccgcc

SEQ ID NO: 9782 - DNA, 20 bp, Artificial
  Synthetically generated peptide
ctgagcggccagagccgcca

SEQ ID NO: 9783 - DNA, 20 bp, Artificial
  Synthetically generated peptide
tgagcggccagagccgccac

SEQ ID NO: 9784 - DNA, 20 bp, Artificial
  Synthetically generated peptide
gagcggccagagccgccacc

SEQ ID NO: 9785 - DNA, 20 bp, Artificial
  Synthetically generated peptide
agcggccagagccgccaccg

SEQ ID NO: 9786 - DNA, 20 bp, Artificial
  Synthetically generated peptide
gcggccagagccgccaccga

SEQ ID NO: 9787 - DNA, 20 bp, Artificial
  Synthetically generated peptide
cggccagagccgccaccgaa

SEQ ID NO: 9788 - DNA, 20 bp, Artificial
  Synthetically generated peptide
ggccagagccgccaccgaac

SEQ ID NO: 9789 - DNA, 20 bp, Artificial
  Synthetically generated peptide
gccagagccgccaccgaaca

SEQ ID NO: 9790 - DNA, 20 bp, Artificial
  Synthetically generated peptide
ccagagccgccaccgaacac

SEQ ID NO: 9791 - DNA, 20 bp, Artificial
  Synthetically generated peptide
cagagccgccaccgaacacg

SEQ ID NO: 9792 - DNA, 20 bp, Artificial
  Synthetically generated peptide
agagccgccaccgaacacgc

SEQ ID NO: 9793 - DNA, 20 bp, Artificial
  Synthetically generated peptide
gagccgccaccgaacacgcc

SEQ ID NO: 9794 - DNA, 20 bp, Artificial
  Synthetically generated peptide
agccgccaccgaacacgccg

SEQ ID NO: 9795 - DNA, 20 bp, Artificial
  Synthetically generated peptide
gccgccaccgaacacgccgc

SEQ ID NO: 9796 - DNA, 20 bp, Artificial
  Synthetically generated peptide
ccgccaccgaacacgccgca

SEQ ID NO: 9797 - DNA, 20 bp, Artificial
  Synthetically generated peptide
cgccaccgaacacgccgcac

SEQ ID NO: 9798 - DNA, 20 bp, Artificial
  Synthetically generated peptide
gccaccgaacacgccgcacc

SEQ ID NO: 9799 - DNA, 20 bp, Artificial
  Synthetically generated peptide
ccaccgaacacgccgcaccg

SEQ ID NO: 9800 - DNA, 20 bp, Artificial
  Synthetically generated peptide
caccgaacacgccgcaccgg

SEQ ID NO: 9801 - DNA, 20 bp, Artificial
  Synthetically generated peptide
accgaacacgccgcaccggc

SEQ ID NO: 9802 - DNA, 20 bp, Artificial
  Synthetically generated peptide
ccgaacacgccgcaccggcc

SEQ ID NO: 9803 - DNA, 20 bp, Artificial
  Synthetically generated peptide
cgaacacgccgcaccggcca

SEQ ID NO: 9804 - DNA, 20 bp, Artificial
  Synthetically generated peptide
gaacacgccgcaccggccac

SEQ ID NO: 9805 - DNA, 20 bp, Artificial
  Synthetically generated peptide
aacacgccgcaccggccacc

SEQ ID NO: 9806 - DNA, 20 bp, Artificial
  Synthetically generated peptide
acacgccgcaccggccaccg

SEQ ID NO: 9807 - DNA, 20 bp, Artificial
  Synthetically generated peptide
cacgccgcaccggccaccgc

SEQ ID NO: 9808 - DNA, 20 bp, Artificial
  Synthetically generated peptide
acgccgcaccggccaccgcc

SEQ ID NO: 9809 - DNA, 20 bp, Artificial
  Synthetically generated peptide
cgccgcaccggccaccgccg

SEQ ID NO: 9810 - DNA, 20 bp, Artificial
  Synthetically generated peptide
gccgcaccggccaccgccgt

SEQ ID NO: 9811 - DNA, 20 bp, Artificial
  Synthetically generated peptide
ccgcaccggccaccgccgtt

SEQ ID NO: 9812 - DNA, 20 bp, Artificial
  Synthetically generated peptide
cgcaccggccaccgccgttc

SEQ ID NO: 9813 - DNA, 20 bp, Artificial
  Synthetically generated peptide
gcaccggccaccgccgttcc

SEQ ID NO: 9814 - DNA, 20 bp, Artificial
  Synthetically generated peptide
caccggccaccgccgttccc

SEQ ID NO: 9815 - DNA, 20 bp, Artificial
  Synthetically generated peptide
accggccaccgccgttccct

SEQ ID NO: 9816 - DNA, 20 bp, Artificial
  Synthetically generated peptide
ccggccaccgccgttccctg

SEQ ID NO: 9817 - DNA, 20 bp, Artificial
  Synthetically generated peptide
cggccaccgccgttccctga

SEQ ID NO: 9818 - DNA, 20 bp, Artificial
  Synthetically generated peptide
ggccaccgccgttccctgat

SEQ ID NO: 9819 - DNA, 20 bp, Artificial
  Synthetically generated peptide
gccaccgccgttccctgata

SEQ ID NO: 9820 - DNA, 20 bp, Artificial
  Synthetically generated peptide
ccaccgccgttccctgatag

SEQ ID NO: 9821 - DNA, 20 bp, Artificial
  Synthetically generated peptide
caccgccgttccctgataga

SEQ ID NO: 9822 - DNA, 20 bp, Artificial
  Synthetically generated peptide
accgccgttccctgatagat

SEQ ID NO: 9823 - DNA, 20 bp, Artificial
  Synthetically generated peptide
ccgccgttccctgatagatt

SEQ ID NO: 9824 - DNA, 20 bp, Artificial
  Synthetically generated peptide
cgccgttccctgatagattg

SEQ ID NO: 9825 - DNA, 20 bp, Artificial
  Synthetically generated peptide
gccgttccctgatagattgc

SEQ ID NO: 9826 - DNA, 20 bp, Artificial
  Synthetically generated peptide
ccgttccctgatagattgct

SEQ ID NO: 9827 - DNA, 20 bp, Artificial
  Synthetically generated peptide
cgttccctgatagattgctg

SEQ ID NO: 9828 - DNA, 20 bp, Artificial
  Synthetically generated peptide
gccgcctcgccgcctcgcgt

SEQ ID NO: 9829 - DNA, 20 bp, Artificial
  Synthetically generated peptide
tgccgcctcgccgcctcgcg

SEQ ID NO: 9830 - DNA, 20 bp, Artificial
  Synthetically generated peptide
ctgccgcctcgccgcctcgc

SEQ ID NO: 9831 - DNA, 20 bp, Artificial
  Synthetically generated peptide
gctgccgcctcgccgcctcg

SEQ ID NO: 9832 - DNA, 20 bp, Artificial
  Synthetically generated peptide
cgctgccgcctcgccgcctc

SEQ ID NO: 9833 - DNA, 20 bp, Artificial
  Synthetically generated peptide
acgctgccgcctcgccgcct

SEQ ID NO: 9834 - DNA, 20 bp, Artificial
  Synthetically generated peptide
cacgctgccgcctcgccgcc

SEQ ID NO: 9835 - DNA, 20 bp, Artificial
  Synthetically generated peptide
acacgctgccgcctcgccgc

SEQ ID NO: 9836 - DNA, 20 bp, Artificial
  Synthetically generated peptide
aacacgctgccgcctcgccg

SEQ ID NO: 9837 - DNA, 20 bp, Artificial
  Synthetically generated peptide
aaacacgctgccgcctcgcc

SEQ ID NO: 9838 - DNA, 20 bp, Artificial
  Synthetically generated peptide
gaaacacgctgccgcctcgc

SEQ ID NO: 9839 - DNA, 20 bp, Artificial
  Synthetically generated peptide
agaaacacgctgccgcctcg

SEQ ID NO: 9840 - DNA, 20 bp, Artificial
  Synthetically generated peptide
tagaaacacgctgccgcctc

SEQ ID NO: 9841 - DNA, 20 bp, Artificial
  Synthetically generated peptide
ctagaaacacgctgccgcct

SEQ ID NO: 9842 - DNA, 20 bp, Artificial
  Synthetically generated peptide
cctagaaacacgctgccgcc

SEQ ID NO: 9843 - DNA, 20 bp, Artificial
  Synthetically generated peptide
acctagaaacacgctgccgc

SEQ ID NO: 9844 - DNA, 20 bp, Artificial
  Synthetically generated peptide
gacctagaaacacgctgccg

SEQ ID NO: 9845 - DNA, 20 bp, Artificial
  Synthetically generated peptide
cgacctagaaacacgctgcc

SEQ ID NO: 9846 - DNA, 20 bp, Artificial
  Synthetically generated peptide
acgacctagaaacacgctgc

SEQ ID NO: 9847 - DNA, 20 bp, Artificial
  Synthetically generated peptide
cacgacctagaaacacgctg

SEQ ID NO: 9848 - DNA, 20 bp, Artificial
  Synthetically generated peptide
ccacgacctagaaacacgct

SEQ ID NO: 9849 - DNA, 20 bp, Artificial
  Synthetically generated peptide
gccacgacctagaaacacgc

SEQ ID NO: 9850 - DNA, 20 bp, Artificial
  Synthetically generated peptide
cgccacgacctagaaacacg

SEQ ID NO: 9851 - DNA, 20 bp, Artificial
  Synthetically generated peptide
acgccacgacctagaaacac

SEQ ID NO: 9852 - DNA, 20 bp, Artificial
  Synthetically generated peptide
gacgccacgacctagaaaca

SEQ ID NO: 9853 - DNA, 20 bp, Artificial
  Synthetically generated peptide
cgacgccacgacctagaaac

SEQ ID NO: 9854 - DNA, 20 bp, Artificial
  Synthetically generated peptide
ccgacgccacgacctagaaa

SEQ ID NO: 9855 - DNA, 20 bp, Artificial
  Synthetically generated peptide
cccgacgccacgacctagaa

SEQ ID NO: 9856 - DNA, 20 bp, Artificial
  Synthetically generated peptide
gcccgacgccacgacctaga

SEQ ID NO: 9857 - DNA, 20 bp, Artificial
  Synthetically generated peptide
agcccgacgccacgacctag

SEQ ID NO: 9858 - DNA, 20 bp, Artificial
  Synthetically generated peptide
aagcccgacgccacgaccta

SEQ ID NO: 9859 - DNA, 20 bp, Artificial
  Synthetically generated peptide
gaagcccgacgccacgacct

SEQ ID NO: 9860 - DNA, 20 bp, Artificial
  Synthetically generated peptide
ggaagcccgacgccacgacc

SEQ ID NO: 9861 - DNA, 20 bp, Artificial
  Synthetically generated peptide
cggaagcccgacgccacgac

SEQ ID NO: 9862 - DNA, 20 bp, Artificial
  Synthetically generated peptide
ccggaagcccgacgccacga

SEQ ID NO: 9863 - DNA, 20 bp, Artificial
  Synthetically generated peptide
tccggaagcccgacgccacg

SEQ ID NO: 9864 - DNA, 20 bp, Artificial
  Synthetically generated peptide
ctccggaagcccgacgccac

SEQ ID NO: 9865 - DNA, 20 bp, Artificial
  Synthetically generated peptide
gctccggaagcccgacgcca

SEQ ID NO: 9866 - DNA, 20 bp, Artificial
  Synthetically generated peptide
agctccggaagcccgacgcc

SEQ ID NO: 9867 - DNA, 20 bp, Artificial
  Synthetically generated peptide
aagctccggaagcccgacgc

SEQ ID NO: 9868 - DNA, 20 bp, Artificial
  Synthetically generated peptide
aaagctccggaagcccgacg

SEQ ID NO: 9869 - DNA, 20 bp, Artificial
  Synthetically generated peptide
caaagctccggaagcccgac

SEQ ID NO: 9870 - DNA, 20 bp, Artificial
  Synthetically generated peptide
ccaaagctccggaagcccga

SEQ ID NO: 9871 - DNA, 20 bp, Artificial
  Synthetically generated peptide
gccaaagctccggaagcccg

SEQ ID NO: 9872 - DNA, 20 bp, Artificial
  Synthetically generated peptide
cgccaaagctccggaagccc

SEQ ID NO: 9873 - DNA, 20 bp, Artificial
  Synthetically generated peptide
ccgccaaagctccggaagcc

SEQ ID NO: 9874 - DNA, 20 bp, Artificial
  Synthetically generated peptide
gccgccaaagctccggaagc

SEQ ID NO: 9875 - DNA, 20 bp, Artificial
  Synthetically generated peptide
tgccgccaaagctccggaag

SEQ ID NO: 9876 - DNA, 20 bp, Artificial
  Synthetically generated peptide
ctgccgccaaagctccggaa

SEQ ID NO: 9877 - DNA, 20 bp, Artificial
  Synthetically generated peptide
gctgccgccaaagctccgga

SEQ ID NO: 9878 - DNA, 20 bp, Artificial
  Synthetically generated peptide
agctgccgccaaagctccgg

SEQ ID NO: 9879 - DNA, 20 bp, Artificial
  Synthetically generated peptide
tagctgccgccaaagctccg

SEQ ID NO: 9880 - DNA, 20 bp, Artificial
  Synthetically generated peptide
ctagctgccgccaaagctcc

SEQ ID NO: 9881 - DNA, 20 bp, Artificial
  Synthetically generated peptide
cctagctgccgccaaagctc

SEQ ID NO: 9882 - DNA, 20 bp, Artificial
  Synthetically generated peptide
ccctagctgccgccaaagct

SEQ ID NO: 9883 - DNA, 20 bp, Artificial
  Synthetically generated peptide
cccctagctgccgccaaagc

SEQ ID NO: 9884 - DNA, 20 bp, Artificial
  Synthetically generated peptide
tcccctagctgccgccaaag

SEQ ID NO: 9885 - DNA, 20 bp, Artificial
  Synthetically generated peptide
ctcccctagctgccgccaaa

SEQ ID NO: 9886 - DNA, 20 bp, Artificial
  Synthetically generated peptide
cctcccctagctgccgccaa

SEQ ID NO: 9887 - DNA, 25 bp, Artificial
  Synthetically generated peptide
cgggaacgcccacggaacccgcgtc

SEQ ID NO: 9888 - DNA, 20 bp, Artificial
  Synthetically generated peptide
gggaacgcccacggaacccg

SEQ ID NO: 9889 - DNA, 20 bp, Artificial
  Synthetically generated peptide
ggaacgcccacggaacccgc

SEQ ID NO: 9890 - DNA, 20 bp, Artificial
  Synthetically generated peptide
gaacgcccacggaacccgcg

SEQ ID NO: 9891 - DNA, 20 bp, Artificial
  Synthetically generated peptide
aacgcccacggaacccgcgt

SEQ ID NO: 9892 - DNA, 20 bp, Artificial
  Synthetically generated peptide
acgcccacggaacccgcgtc

SEQ ID NO: 9893 - DNA, 20 bp, Artificial
  Synthetically generated peptide
cgcccacggaacccgcgtcc

SEQ ID NO: 9894 - DNA, 20 bp, Artificial
  Synthetically generated peptide
gcccacggaacccgcgtcca

SEQ ID NO: 9895 - DNA, 20 bp, Artificial
  Synthetically generated peptide
cccacggaacccgcgtccac

SEQ ID NO: 9896 - DNA, 20 bp, Artificial
  Synthetically generated peptide
ccacggaacccgcgtccacg

SEQ ID NO: 9897 - DNA, 20 bp, Artificial
  Synthetically generated peptide
cacggaacccgcgtccacgg

SEQ ID NO: 9898 - DNA, 20 bp, Artificial
  Synthetically generated peptide
acggaacccgcgtccacggg

SEQ ID NO: 9899 - DNA, 20 bp, Artificial
  Synthetically generated peptide
cggaacccgcgtccacgggg

SEQ ID NO: 9900 - DNA, 20 bp, Artificial
  Synthetically generated peptide
ggaacccgcgtccacggggc

SEQ ID NO: 9901 - DNA, 20 bp, Artificial
  Synthetically generated peptide
gaacccgcgtccacggggcg

SEQ ID NO: 9902 - DNA, 20 bp, Artificial
  Synthetically generated peptide
aacccgcgtccacggggcgg

SEQ ID NO: 9903 - DNA, 20 bp, Artificial
  Synthetically generated peptide
acccgcgtccacggggcggg

SEQ ID NO: 9904 - DNA, 20 bp, Artificial
  Synthetically generated peptide
cccgcgtccacggggcgggg

SEQ ID NO: 9905 - DNA, 20 bp, Artificial
  Synthetically generated peptide
ccgcgtccacggggcggggc

SEQ ID NO: 9906 - DNA, 20 bp, Artificial
  Synthetically generated peptide
cgcgtccacggggcggggcc

SEQ ID NO: 9907 - DNA, 20 bp, Artificial
  Synthetically generated peptide
gcgtccacggggcggggccg

SEQ ID NO: 9908 - DNA, 20 bp, Artificial
  Synthetically generated peptide
cgtccacggggcggggccgg

SEQ ID NO: 9909 - DNA, 20 bp, Artificial
  Synthetically generated peptide
gtccacggggcggggccggc

SEQ ID NO: 9910 - DNA, 20 bp, Artificial
  Synthetically generated peptide
tccacggggcggggccggcg

SEQ ID NO: 9911 - DNA, 20 bp, Artificial
  Synthetically generated peptide
ccacggggcggggccggcgg

SEQ ID NO: 9912 - DNA, 20 bp, Artificial
  Synthetically generated peptide
cacggggcggggccggcggc

SEQ ID NO: 9913 - DNA, 20 bp, Artificial
  Synthetically generated peptide
gcgggaacgcccacggaacc

SEQ ID NO: 9914 - DNA, 20 bp, Artificial
  Synthetically generated peptide
cgcgggaacgcccacggaac

SEQ ID NO: 9915 - DNA, 20 bp, Artificial
  Synthetically generated peptide
ccgcgggaacgcccacggaa

SEQ ID NO: 9916 - DNA, 20 bp, Artificial
  Synthetically generated peptide
gccgcgggaacgcccacgga

SEQ ID NO: 9917 - DNA, 20 bp, Artificial
  Synthetically generated peptide
ggccgcgggaacgcccacgg

SEQ ID NO: 9918 - DNA, 20 bp, Artificial
  Synthetically generated peptide
tggccgcgggaacgcccacg

SEQ ID NO: 9919 - DNA, 20 bp, Artificial
  Synthetically generated peptide
ctggccgcgggaacgcccac

SEQ ID NO: 9920 - DNA, 20 bp, Artificial
  Synthetically generated peptide
cctggccgcgggaacgccca

SEQ ID NO: 9921 - DNA, 20 bp, Artificial
  Synthetically generated peptide
gcctggccgcgggaacgccc

SEQ ID NO: 9922 - DNA, 20 bp, Artificial
  Synthetically generated peptide
tgcctggccgcgggaacgcc

SEQ ID NO: 9923 - DNA, 20 bp, Artificial
  Synthetically generated peptide
atgcctggccgcgggaacgc

SEQ ID NO: 9924 - DNA, 20 bp, Artificial
  Synthetically generated peptide
gatgcctggccgcgggaacg

SEQ ID NO: 9925 - DNA, 20 bp, Artificial
  Synthetically generated peptide
tgatgcctggccgcgggaac

SEQ ID NO: 9926 - DNA, 20 bp, Artificial
  Synthetically generated peptide
ctgatgcctggccgcgggaa

SEQ ID NO: 9927 - DNA, 20 bp, Artificial
  Synthetically generated peptide
gctgatgcctggccgcggga

SEQ ID NO: 9928 - DNA, 20 bp, Artificial
  Synthetically generated peptide
tgctgatgcctggccgcggg

SEQ ID NO: 9929 - DNA, 20 bp, Artificial
  Synthetically generated peptide
ttgctgatgcctggccgcgg

SEQ ID NO: 9930 - DNA, 20 bp, Artificial
  Synthetically generated peptide
attgctgatgcctggccgcg

SEQ ID NO: 9931 - DNA, 20 bp, Artificial
  Synthetically generated peptide
gattgctgatgcctggccgc

SEQ ID NO: 9932 - DNA, 20 bp, Artificial
  Synthetically generated peptide
agattgctgatgcctggccg

SEQ ID NO: 9933 - DNA, 25 bp, Artificial
  Synthetically generated peptide
cgggtggagctctgcgggccgctgc

SEQ ID NO: 9934 - DNA, 20 bp, Artificial
  Synthetically generated peptide
gggtggagctctgcgggccg

SEQ ID NO: 9935 - DNA, 20 bp, Artificial
  Synthetically generated peptide
ggtggagctctgcgggccgc

SEQ ID NO: 9936 - DNA, 20 bp, Artificial
  Synthetically generated peptide
gtggagctctgcgggccgct

SEQ ID NO: 9937 - DNA, 20 bp, Artificial
  Synthetically generated peptide
tggagctctgcgggccgctg

SEQ ID NO: 9938 - DNA, 20 bp, Artificial
  Synthetically generated peptide
ggagctctgcgggccgctgc

SEQ ID NO: 9939 - DNA, 20 bp, Artificial
  Synthetically generated peptide
gagctctgcgggccgctgcc

SEQ ID NO: 9940 - DNA, 20 bp, Artificial
  Synthetically generated peptide
agctctgcgggccgctgccc

SEQ ID NO: 9941 - DNA, 20 bp, Artificial
  Synthetically generated peptide
gctctgcgggccgctgccct

SEQ ID NO: 9942 - DNA, 20 bp, Artificial
  Synthetically generated peptide
ctctgcgggccgctgccctg

SEQ ID NO: 9943 - DNA, 20 bp, Artificial
  Synthetically generated peptide
tctgcgggccgctgccctgg

SEQ ID NO: 9944 - DNA, 20 bp, Artificial
  Synthetically generated peptide
ctgcgggccgctgccctggg

SEQ ID NO: 9945 - DNA, 20 bp, Artificial
  Synthetically generated peptide
tgcgggccgctgccctgggg

SEQ ID NO: 9946 - DNA, 20 bp, Artificial
  Synthetically generated peptide
gcgggccgctgccctggggg

SEQ ID NO: 9947 - DNA, 20 bp, Artificial
  Synthetically generated peptide
cgggccgctgccctgggggc

SEQ ID NO: 9948 - DNA, 20 bp, Artificial
  Synthetically generated peptide
gggccgctgccctgggggcc

SEQ ID NO: 9949 - DNA, 20 bp, Artificial
  Synthetically generated peptide
ggccgctgccctgggggccg

SEQ ID NO: 9950 - DNA, 20 bp, Artificial
  Synthetically generated peptide
gccgctgccctgggggccga

SEQ ID NO: 9951 - DNA, 20 bp, Artificial
  Synthetically generated peptide
ccgctgccctgggggccgag

SEQ ID NO: 9952 - DNA, 20 bp, Artificial
  Synthetically generated peptide
cgctgccctgggggccgagg

SEQ ID NO: 9953 - DNA, 20 bp, Artificial
  Synthetically generated peptide
gctgccctgggggccgaggc

SEQ ID NO: 9954 - DNA, 20 bp, Artificial
  Synthetically generated peptide
ctgccctgggggccgaggcg

SEQ ID NO: 9955 - DNA, 20 bp, Artificial
  Synthetically generated peptide
tgccctgggggccgaggcgg

SEQ ID NO: 9956 - DNA, 20 bp, Artificial
  Synthetically generated peptide
gccctgggggccgaggcggg

SEQ ID NO: 9957 - DNA, 20 bp, Artificial
  Synthetically generated peptide
ccctgggggccgaggcgggg

SEQ ID NO: 9958 - DNA, 20 bp, Artificial
  Synthetically generated peptide
cctgggggccgaggcggggc

SEQ ID NO: 9959 - DNA, 20 bp, Artificial
  Synthetically generated peptide
ctgggggccgaggcggggct

SEQ ID NO: 9960 - DNA, 20 bp, Artificial
  Synthetically generated peptide
tgggggccgaggcggggctt

SEQ ID NO: 9961 - DNA, 20 bp, Artificial
  Synthetically generated peptide
ccgggtggagctctgcgggc

SEQ ID NO: 9962 - DNA, 20 bp, Artificial
  Synthetically generated peptide
gccgggtggagctctgcggg

SEQ ID NO: 9963 - DNA, 20 bp, Artificial
  Synthetically generated peptide
tgccgggtggagctctgcgg

SEQ ID NO: 9964 - DNA, 20 bp, Artificial
  Synthetically generated peptide
ctgccgggtggagctctgcg

SEQ ID NO: 9965 - DNA, 20 bp, Artificial
  Synthetically generated peptide
cctgccgggtggagctctgc

SEQ ID NO: 9966 - DNA, 20 bp, Artificial
  Synthetically generated peptide
gcctgccgggtggagctctg

SEQ ID NO: 9967 - DNA, 20 bp, Artificial
  Synthetically generated peptide
cgcctgccgggtggagctct

SEQ ID NO: 9968 - DNA, 20 bp, Artificial
  Synthetically generated peptide
gcgcctgccgggtggagctc

SEQ ID NO: 9969 - DNA, 20 bp, Artificial
  Synthetically generated peptide
ggcgcctgccgggtggagct

SEQ ID NO: 9970 - DNA, 20 bp, Artificial
  Synthetically generated peptide
gggcgcctgccgggtggagc

SEQ ID NO: 9971 - DNA, 20 bp, Artificial
  Synthetically generated peptide
cgggcgcctgccgggtggag

SEQ ID NO: 9972 - DNA, 20 bp, Artificial
  Synthetically generated peptide
ccgggcgcctgccgggtgga

SEQ ID NO: 9973 - DNA, 20 bp, Artificial
  Synthetically generated peptide
cccgggcgcctgccgggtgg

SEQ ID NO: 9974 - DNA, 20 bp, Artificial
  Synthetically generated peptide
tcccgggcgcctgccgggtg

SEQ ID NO: 9975 - DNA, 20 bp, Artificial
  Synthetically generated peptide
ttcccgggcgcctgccgggt

SEQ ID NO: 9976 - DNA, 20 bp, Artificial
  Synthetically generated peptide
tttcccgggcgcctgccggg

SEQ ID NO: 9977 - DNA, 20 bp, Artificial
  Synthetically generated peptide
gtttcccgggcgcctgccgg

SEQ ID NO: 9978 - DNA, 20 bp, Artificial
  Synthetically generated peptide
agtttcccgggcgcctgccg

SEQ ID NO: 9979 - DNA, 20 bp, Artificial
  Synthetically generated peptide
gagtttcccgggcgcctgcc

SEQ ID NO: 9980 - DNA, 20 bp, Artificial
  Synthetically generated peptide
ggagtttcccgggcgcctgc

SEQ ID NO: 9981 - DNA, 20 bp, Artificial
  Synthetically generated peptide
cggagtttcccgggcgcctg

SEQ ID NO: 9982 - DNA, 20 bp, Artificial
  Synthetically generated peptide
gcggagtttcccgggcgcct

SEQ ID NO: 9983 - DNA, 20 bp, Artificial
  Synthetically generated peptide
ggcggagtttcccgggcgcc

SEQ ID NO: 9984 - DNA, 20 bp, Artificial
  Synthetically generated peptide
gggcggagtttcccgggcgc

SEQ ID NO: 9985 - DNA, 20 bp, Artificial
  Synthetically generated peptide
ggggcggagtttcccgggcg

SEQ ID NO: 9986 - DNA, 20 bp, Artificial
  Synthetically generated peptide
gggggcggagtttcccgggc

SEQ ID NO: 9987 - DNA, 20 bp, Artificial
  Synthetically generated peptide
ggggggcggagtttcccggg

SEQ ID NO: 9988 - DNA, 20 bp, Artificial
  Synthetically generated peptide
cggggggcggagtttcccgg

SEQ ID NO: 9989 - DNA, 20 bp, Artificial
  Synthetically generated peptide
ccggggggcggagtttcccg

SEQ ID NO: 9990 - DNA, 20 bp, Artificial
  Synthetically generated peptide
gccggggggcggagtttccc

SEQ ID NO: 9991 - DNA, 20 bp, Artificial
  Synthetically generated peptide
ggccggggggcggagtttcc

SEQ ID NO: 9992 - DNA, 25 bp, Artificial
  Synthetically generated peptide
cgccggccccaaactcttaagtgtg

SEQ ID NO: 9993 - DNA, 20 bp, Artificial
  Synthetically generated peptide
gccggccccaaactcttaag

SEQ ID NO: 9994 - DNA, 20 bp, Artificial
  Synthetically generated peptide
ccggccccaaactcttaagt

SEQ ID NO: 9995 - DNA, 20 bp, Artificial
  Synthetically generated peptide
cggccccaaactcttaagtg

SEQ ID NO: 9996 - DNA, 20 bp, Artificial
  Synthetically generated peptide
acgccggccccaaactctta

SEQ ID NO: 9997 - DNA, 20 bp, Artificial
  Synthetically generated peptide
cacgccggccccaaactctt

SEQ ID NO: 9998 - DNA, 20 bp, Artificial
  Synthetically generated peptide
ccacgccggccccaaactct

SEQ ID NO: 9999 - DNA, 20 bp, Artificial
  Synthetically generated peptide
accacgccggccccaaactc

SEQ ID NO: 10000 - DNA, 20 bp, Artificial
  Synthetically generated peptide
taccacgccggccccaaact

SEQ ID NO: 10001 - DNA, 20 bp, Artificial
  Synthetically generated peptide
ctaccacgccggccccaaac

SEQ ID NO: 10002 - DNA, 20 bp, Artificial
  Synthetically generated peptide
gctaccacgccggccccaaa

SEQ ID NO: 10003 - DNA, 20 bp, Artificial
  Synthetically generated peptide
agctaccacgccggccccaa

SEQ ID NO: 10004 - DNA, 20 bp, Artificial
  Synthetically generated peptide
gagctaccacgccggcccca

SEQ ID NO: 10005 - DNA, 20 bp, Artificial
  Synthetically generated peptide
tgagctaccacgccggcccc

SEQ ID NO: 10006 - DNA, 20 bp, Artificial
  Synthetically generated peptide
atgagctaccacgccggccc

SEQ ID NO: 10007 - DNA, 20 bp, Artificial
  Synthetically generated peptide
catgagctaccacgccggcc

SEQ ID NO: 10008 - DNA, 20 bp, Artificial
  Synthetically generated peptide
gcatgagctaccacgccggc

SEQ ID NO: 10009 - DNA, 20 bp, Artificial
  Synthetically generated peptide
ggcatgagctaccacgccgg

SEQ ID NO: 10010 - DNA, 20 bp, Artificial
  Synthetically generated peptide
gggcatgagctaccacgccg

SEQ ID NO: 10011 - DNA, 20 bp, Artificial
  Synthetically generated peptide
ggggcatgagctaccacgcc

SEQ ID NO: 10012 - DNA, 20 bp, Artificial
  Synthetically generated peptide
aggggcatgagctaccacgc

SEQ ID NO: 10013 - DNA, 20 bp, Artificial
  Synthetically generated peptide
caggggcatgagctaccacg

SEQ ID NO: 10014 - DNA, 25 bp, Artificial
  Synthetically generated peptide
cgggaagcgcaggcccccgcctcgg

SEQ ID NO: 10015 - DNA, 20 bp, Artificial
  Synthetically generated peptide
gggaagcgcaggcccccgcc

SEQ ID NO: 10016 - DNA, 20 bp, Artificial
  Synthetically generated peptide
ggaagcgcaggcccccgcct

SEQ ID NO: 10017 - DNA, 20 bp, Artificial
  Synthetically generated peptide
gaagcgcaggcccccgcctc

SEQ ID NO: 10018 - DNA, 20 bp, Artificial
  Synthetically generated peptide
aagcgcaggcccccgcctcg

SEQ ID NO: 10019 - DNA, 20 bp, Artificial
  Synthetically generated peptide
agcgcaggcccccgcctcgg

SEQ ID NO: 10020 - DNA, 20 bp, Artificial
  Synthetically generated peptide
gcgcaggcccccgcctcggg

SEQ ID NO: 10021 - DNA, 20 bp, Artificial
  Synthetically generated peptide
cgcaggcccccgcctcggga

SEQ ID NO: 10022 - DNA, 20 bp, Artificial
  Synthetically generated peptide
gcaggcccccgcctcgggaa

SEQ ID NO: 10023 - DNA, 20 bp, Artificial
  Synthetically generated peptide
caggcccccgcctcgggaat

SEQ ID NO: 10024 - DNA, 20 bp, Artificial
  Synthetically generated peptide
aggcccccgcctcgggaata

SEQ ID NO: 10025 - DNA, 20 bp, Artificial
  Synthetically generated peptide
ggcccccgcctcgggaatat

SEQ ID NO: 10026 - DNA, 20 bp, Artificial
  Synthetically generated peptide
gcccccgcctcgggaatata

SEQ ID NO: 10027 - DNA, 20 bp, Artificial
  Synthetically generated peptide
cccccgcctcgggaatatag

SEQ ID NO: 10028 - DNA, 20 bp, Artificial
  Synthetically generated peptide
ccccgcctcgggaatatagt

SEQ ID NO: 10029 - DNA, 20 bp, Artificial
  Synthetically generated peptide
cccgcctcgggaatatagtt

SEQ ID NO: 10030 - DNA, 20 bp, Artificial
  Synthetically generated peptide
ccgcctcgggaatatagttg

SEQ ID NO: 10031 - DNA, 20 bp, Artificial
  Synthetically generated peptide
cgcctcgggaatatagttga

SEQ ID NO: 10032 - DNA, 20 bp, Artificial
  Synthetically generated peptide
gcctcgggaatatagttgat

SEQ ID NO: 10033 - DNA, 20 bp, Artificial
  Synthetically generated peptide
ccgggaagcgcaggcccccg

SEQ ID NO: 10034 - DNA, 20 bp, Artificial
  Synthetically generated peptide
tccgggaagcgcaggccccc

SEQ ID NO: 10035 - DNA, 20 bp, Artificial
  Synthetically generated peptide
gtccgggaagcgcaggcccc

SEQ ID NO: 10036 - DNA, 20 bp, Artificial
  Synthetically generated peptide
ggtccgggaagcgcaggccc

SEQ ID NO: 10037 - DNA, 20 bp, Artificial
  Synthetically generated peptide
gggtccgggaagcgcaggcc

SEQ ID NO: 10038 - DNA, 20 bp, Artificial
  Synthetically generated peptide
tgggtccgggaagcgcaggc

SEQ ID NO: 10039 - DNA, 20 bp, Artificial
  Synthetically generated peptide
ctgggtccgggaagcgcagg

SEQ ID NO: 10040 - DNA, 20 bp, Artificial
  Synthetically generated peptide
gctgggtccgggaagcgcag

SEQ ID NO: 10041 - DNA, 20 bp, Artificial
  Synthetically generated peptide
agctgggtccgggaagcgca

SEQ ID NO: 10042 - DNA, 20 bp, Artificial
  Synthetically generated peptide
cagctgggtccgggaagcgc

SEQ ID NO: 10043 - DNA, 20 bp, Artificial
  Synthetically generated peptide
gcagctgggtccgggaagcg

SEQ ID NO: 10044 - DNA, 20 bp, Artificial
  Synthetically generated peptide
ggcagctgggtccgggaagc

SEQ ID NO: 10045 - DNA, 25 bp, Artificial
  Synthetically generated peptide
cgttctaacctgccgtccacagacc

SEQ ID NO: 10046 - DNA, 20 bp, Artificial
  Synthetically generated peptide
gttctaacctgccgtccaca

SEQ ID NO: 10047 - DNA, 20 bp, Artificial
  Synthetically generated peptide
ttctaacctgccgtccacag

SEQ ID NO: 10048 - DNA, 20 bp, Artificial
  Synthetically generated peptide
tctaacctgccgtccacaga

SEQ ID NO: 10049 - DNA, 20 bp, Artificial
  Synthetically generated peptide
ctaacctgccgtccacagac

SEQ ID NO: 10050 - DNA, 20 bp, Artificial
  Synthetically generated peptide
taacctgccgtccacagacc

SEQ ID NO: 10051 - DNA, 20 bp, Artificial
  Synthetically generated peptide
aacctgccgtccacagaccg

SEQ ID NO: 10052 - DNA, 20 bp, Artificial
  Synthetically generated peptide
acctgccgtccacagaccgt

SEQ ID NO: 10053 - DNA, 20 bp, Artificial
  Synthetically generated peptide
cctgccgtccacagaccgtc

SEQ ID NO: 10054 - DNA, 20 bp, Artificial
  Synthetically generated peptide
ctgccgtccacagaccgtcg

SEQ ID NO: 10055 - DNA, 20 bp, Artificial
  Synthetically generated peptide
tgccgtccacagaccgtcgg

SEQ ID NO: 10056 - DNA, 20 bp, Artificial
  Synthetically generated peptide
gccgtccacagaccgtcggg

SEQ ID NO: 10057 - DNA, 20 bp, Artificial
  Synthetically generated peptide
ccgtccacagaccgtcggga

SEQ ID NO: 10058 - DNA, 20 bp, Artificial
  Synthetically generated peptide
cgtccacagaccgtcgggac

SEQ ID NO: 10059 - DNA, 20 bp, Artificial
  Synthetically generated peptide
gtccacagaccgtcgggaca

SEQ ID NO: 10060 - DNA, 20 bp, Artificial
  Synthetically generated peptide
tccacagaccgtcgggacaa

SEQ ID NO: 10061 - DNA, 20 bp, Artificial
  Synthetically generated peptide
ccacagaccgtcgggacaaa

SEQ ID NO: 10062 - DNA, 20 bp, Artificial
  Synthetically generated peptide
cacagaccgtcgggacaaaa

SEQ ID NO: 10063 - DNA, 20 bp, Artificial
  Synthetically generated peptide
acagaccgtcgggacaaaat

SEQ ID NO: 10064 - DNA, 20 bp, Artificial
  Synthetically generated peptide
cagaccgtcgggacaaaata

SEQ ID NO: 10065 - DNA, 20 bp, Artificial
  Synthetically generated peptide
agaccgtcgggacaaaatac

SEQ ID NO: 10066 - DNA, 20 bp, Artificial
  Synthetically generated peptide
gaccgtcgggacaaaatacc

SEQ ID NO: 10067 - DNA, 20 bp, Artificial
  Synthetically generated peptide
accgtcgggacaaaatacca

SEQ ID NO: 10068 - DNA, 20 bp, Artificial
  Synthetically generated peptide
ccgtcgggacaaaataccaa

SEQ ID NO: 10069 - DNA, 20 bp, Artificial
  Synthetically generated peptide
cgtcgggacaaaataccaac

SEQ ID NO: 10070 - DNA, 20 bp, Artificial
  Synthetically generated peptide
gtcgggacaaaataccaact

SEQ ID NO: 10071 - DNA, 20 bp, Artificial
  Synthetically generated peptide
tcgggacaaaataccaactg

SEQ ID NO: 10072 - DNA, 20 bp, Artificial
  Synthetically generated peptide
cgggacaaaataccaactga

SEQ ID NO: 10073 - DNA, 20 bp, Artificial
  Synthetically generated peptide
gcgttctaacctgccgtcca

SEQ ID NO: 10074 - DNA, 20 bp, Artificial
  Synthetically generated peptide
ggcgttctaacctgccgtcc

SEQ ID NO: 10075 - DNA, 20 bp, Artificial
  Synthetically generated peptide
gggcgttctaacctgccgtc

SEQ ID NO: 10076 - DNA, 20 bp, Artificial
  Synthetically generated peptide
cgggcgttctaacctgccgt

SEQ ID NO: 10077 - DNA, 20 bp, Artificial
  Synthetically generated peptide
acgggcgttctaacctgccg

SEQ ID NO: 10078 - DNA, 20 bp, Artificial
  Synthetically generated peptide
gacgggcgttctaacctgcc

SEQ ID NO: 10079 - DNA, 20 bp, Artificial
  Synthetically generated peptide
ggacgggcgttctaacctgc

SEQ ID NO: 10080 - DNA, 20 bp, Artificial
  Synthetically generated peptide
tggacgggcgttctaacctg

SEQ ID NO: 10081 - DNA, 20 bp, Artificial
  Synthetically generated peptide
ttggacgggcgttctaacct

SEQ ID NO: 10082 - DNA, 20 bp, Artificial
  Synthetically generated peptide
cttggacgggcgttctaacc

SEQ ID NO: 10083 - DNA, 20 bp, Artificial
  Synthetically generated peptide
gcttggacgggcgttctaac

SEQ ID NO: 10084 - DNA, 20 bp, Artificial
  Synthetically generated peptide
ggcttggacgggcgttctaa

SEQ ID NO: 10085 - DNA, 20 bp, Artificial
  Synthetically generated peptide
tggcttggacgggcgttcta

SEQ ID NO: 10086 - DNA, 20 bp, Artificial
  Synthetically generated peptide
ctggcttggacgggcgttct

SEQ ID NO: 10087 - DNA, 20 bp, Artificial
  Synthetically generated peptide
cctggcttggacgggcgttc

SEQ ID NO: 10088 - DNA, 20 bp, Artificial
  Synthetically generated peptide
tcctggcttggacgggcgtt

SEQ ID NO: 10089 - DNA, 20 bp, Artificial
  Synthetically generated peptide
ctcctggcttggacgggcgt

SEQ ID NO: 10090 - DNA, 20 bp, Artificial
  Synthetically generated peptide
cctcctggcttggacgggcg

SEQ ID NO: 10091 - DNA, 20 bp, Artificial
  Synthetically generated peptide
ccctcctggcttggacgggc

SEQ ID NO: 10092 - DNA, 20 bp, Artificial
  Synthetically generated peptide
accctcctggcttggacggg

SEQ ID NO: 10093 - DNA, 20 bp, Artificial
  Synthetically generated peptide
caccctcctggcttggacgg

SEQ ID NO: 10094 - DNA, 20 bp, Artificial
  Synthetically generated peptide
ccaccctcctggcttggacg

SEQ ID NO: 10095 - DNA, 26 bp, Artificial
  Synthetically generated peptide
cggggaaagaatcattcaaccagcgg

SEQ ID NO: 10096 - DNA, 25 bp, Artificial
  Synthetically generated peptide
cggtttcttctccatcgcgggggcg

SEQ ID NO: 10097 - DNA, 20 bp, Artificial
  Synthetically generated peptide
ggtttcttctccatcgcggg

SEQ ID NO: 10098 - DNA, 20 bp, Artificial
  Synthetically generated peptide
gtttcttctccatcgcgggg

SEQ ID NO: 10099 - DNA, 20 bp, Artificial
  Synthetically generated peptide
tttcttctccatcgcggggg

SEQ ID NO: 10100 - DNA, 20 bp, Artificial
  Synthetically generated peptide
ttcttctccatcgcgggggc

SEQ ID NO: 10101 - DNA, 20 bp, Artificial
  Synthetically generated peptide
tcttctccatcgcgggggcg

SEQ ID NO: 10102 - DNA, 20 bp, Artificial
  Synthetically generated peptide
cttctccatcgcgggggcgg

SEQ ID NO: 10103 - DNA, 20 bp, Artificial
  Synthetically generated peptide
ttctccatcgcgggggcggg

SEQ ID NO: 10104 - DNA, 20 bp, Artificial
  Synthetically generated peptide
tctccatcgcgggggcgggg

SEQ ID NO: 10105 - DNA, 20 bp, Artificial
  Synthetically generated peptide
ctccatcgcgggggcgggga

SEQ ID NO: 10106 - DNA, 20 bp, Artificial
  Synthetically generated peptide
tccatcgcgggggcggggat

SEQ ID NO: 10107 - DNA, 20 bp, Artificial
  Synthetically generated peptide
ccatcgcgggggcggggatt

SEQ ID NO: 10108 - DNA, 20 bp, Artificial
  Synthetically generated peptide
catcgcgggggcggggattt

SEQ ID NO: 10109 - DNA, 20 bp, Artificial
  Synthetically generated peptide
atcgcgggggcggggatttg

SEQ ID NO: 10110 - DNA, 20 bp, Artificial
  Synthetically generated peptide
tcgcgggggcggggatttgg

SEQ ID NO: 10111 - DNA, 20 bp, Artificial
  Synthetically generated peptide
tcggtttcttctccatcgcg

SEQ ID NO: 10112 - DNA, 20 bp, Artificial
  Synthetically generated peptide
ctcggtttcttctccatcgc

SEQ ID NO: 10113 - DNA, 20 bp, Artificial
  Synthetically generated peptide
tctcggtttcttctccatcg

SEQ ID NO: 10114 - DNA, 20 bp, Artificial
  Synthetically generated peptide
gtctcggtttcttctccatc

SEQ ID NO: 10115 - DNA, 20 bp, Artificial
  Synthetically generated peptide
tgtctcggtttcttctccat

SEQ ID NO: 10116 - DNA, 20 bp, Artificial
  Synthetically generated peptide
ctgtctcggtttcttctcca

SEQ ID NO: 10117 - DNA, 20 bp, Artificial
  Synthetically generated peptide
tctgtctcggtttcttctcc

SEQ ID NO: 10118 - DNA, 20 bp, Artificial
  Synthetically generated peptide
ttctgtctcggtttcttctc

SEQ ID NO: 10119 - DNA, 20 bp, Artificial
  Synthetically generated peptide
cttctgtctcggtttcttct

SEQ ID NO: 10120 - DNA, 20 bp, Artificial
  Synthetically generated peptide
ccttctgtctcggtttcttc

SEQ ID NO: 10121 - DNA, 20 bp, Artificial
  Synthetically generated peptide
accttctgtctcggtttctt

SEQ ID NO: 10122 - DNA, 20 bp, Artificial
  Synthetically generated peptide
caccttctgtctcggtttct

SEQ ID NO: 10123 - DNA, 20 bp, Artificial
  Synthetically generated peptide
gcaccttctgtctcggtttc

SEQ ID NO: 10124 - DNA, 20 bp, Artificial
  Synthetically generated peptide
tgcaccttctgtctcggttt

SEQ ID NO: 10125 - DNA, 20 bp, Artificial
  Synthetically generated peptide
ctgcaccttctgtctcggtt

SEQ ID NO: 10126 - DNA, 20 bp, Artificial
  Synthetically generated peptide
cctgcaccttctgtctcggt

SEQ ID NO: 10127 - DNA, 20 bp, Artificial
  Synthetically generated peptide
ccctgcaccttctgtctcgg

SEQ ID NO: 10128 - DNA, 20 bp, Artificial
  Synthetically generated peptide
gccctgcaccttctgtctcg

SEQ ID NO: 10129 - DNA, 27 bp, Artificial
  Synthetically generated peptide
ctgctccgattccgaggggggtcttct

SEQ ID NO: 10130 - DNA, 20 bp, Artificial
  Synthetically generated peptide
tgctccgattccgagggggg

SEQ ID NO: 10131 - DNA, 20 bp, Artificial
  Synthetically generated peptide
gctccgattccgaggggggt

SEQ ID NO: 10132 - DNA, 20 bp, Artificial
  Synthetically generated peptide
ctccgattccgaggggggtc

SEQ ID NO: 10133 - DNA, 20 bp, Artificial
  Synthetically generated peptide
tccgattccgaggggggtct

SEQ ID NO: 10134 - DNA, 20 bp, Artificial
  Synthetically generated peptide
ccgattccgaggggggtctt

SEQ ID NO: 10135 - DNA, 20 bp, Artificial
  Synthetically generated peptide
cgattccgaggggggtcttc

SEQ ID NO: 10136 - DNA, 20 bp, Artificial
  Synthetically generated peptide
gattccgaggggggtcttct

SEQ ID NO: 10137 - DNA, 20 bp, Artificial
  Synthetically generated peptide
attccgaggggggtcttctg

SEQ ID NO: 10138 - DNA, 20 bp, Artificial
  Synthetically generated peptide
ttccgaggggggtcttctgg

SEQ ID NO: 10139 - DNA, 20 bp, Artificial
  Synthetically generated peptide
tccgaggggggtcttctggg

SEQ ID NO: 10140 - DNA, 20 bp, Artificial
  Synthetically generated peptide
ccgaggggggtcttctgggc

SEQ ID NO: 10141 - DNA, 20 bp, Artificial
  Synthetically generated peptide
cgaggggggtcttctgggcc

SEQ ID NO: 10142 - DNA, 20 bp, Artificial
  Synthetically generated peptide
cctgctccgattccgagggg

SEQ ID NO: 10143 - DNA, 20 bp, Artificial
  Synthetically generated peptide
ccctgctccgattccgaggg

SEQ ID NO: 10144 - DNA, 20 bp, Artificial
  Synthetically generated peptide
tccctgctccgattccgagg

SEQ ID NO: 10145 - DNA, 20 bp, Artificial
  Synthetically generated peptide
ctccctgctccgattccgag

SEQ ID NO: 10146 - DNA, 20 bp, Artificial
  Synthetically generated peptide
cctccctgctccgattccga

SEQ ID NO: 10147 - DNA, 20 bp, Artificial
  Synthetically generated peptide
tcctccctgctccgattccg

SEQ ID NO: 10148 - DNA, 20 bp, Artificial
  Synthetically generated peptide
atcctccctgctccgattcc

SEQ ID NO: 10149 - DNA, 20 bp, Artificial
  Synthetically generated peptide
catcctccctgctccgattc

SEQ ID NO: 10150 - DNA, 20 bp, Artificial
  Synthetically generated peptide
ccatcctccctgctccgatt

SEQ ID NO: 10151 - DNA, 20 bp, Artificial
  Synthetically generated peptide
cccatcctccctgctccgat

SEQ ID NO: 10152 - DNA, 20 bp, Artificial
  Synthetically generated peptide
ccccatcctccctgctccga

SEQ ID NO: 10153 - DNA, 20 bp, Artificial
  Synthetically generated peptide
tccccatcctccctgctccg

SEQ ID NO: 10154 - DNA, 27 bp, Artificial
  Synthetically generated peptide
ctccgtgtggggctctggtcggcagct

SEQ ID NO: 10155 - DNA, 20 bp, Artificial
  Synthetically generated peptide
tccgtgtggggctctggtcg

SEQ ID NO: 10156 - DNA, 20 bp, Artificial
  Synthetically generated peptide
ccgtgtggggctctggtcgg

SEQ ID NO: 10157 - DNA, 20 bp, Artificial
  Synthetically generated peptide
cgtgtggggctctggtcggc

SEQ ID NO: 10158 - DNA, 20 bp, Artificial
  Synthetically generated peptide
gtgtggggctctggtcggca

SEQ ID NO: 10159 - DNA, 20 bp, Artificial
  Synthetically generated peptide
tgtggggctctggtcggcag

SEQ ID NO: 10160 - DNA, 20 bp, Artificial
  Synthetically generated peptide
gtggggctctggtcggcagc

SEQ ID NO: 10161 - DNA, 20 bp, Artificial
  Synthetically generated peptide
tggggctctggtcggcagct

SEQ ID NO: 10162 - DNA, 20 bp, Artificial
  Synthetically generated peptide
ggggctctggtcggcagctg

SEQ ID NO: 10163 - DNA, 20 bp, Artificial
  Synthetically generated peptide
gggctctggtcggcagctgg

SEQ ID NO: 10164 - DNA, 20 bp, Artificial
  Synthetically generated peptide
ggctctggtcggcagctggc

SEQ ID NO: 10165 - DNA, 20 bp, Artificial
  Synthetically generated peptide
gctctggtcggcagctggct

SEQ ID NO: 10166 - DNA, 20 bp, Artificial
  Synthetically generated peptide
ctctggtcggcagctggctt

SEQ ID NO: 10167 - DNA, 20 bp, Artificial
  Synthetically generated peptide
tctggtcggcagctggcttt

SEQ ID NO: 10168 - DNA, 20 bp, Artificial
  Synthetically generated peptide
ctggtcggcagctggctttc

SEQ ID NO: 10169 - DNA, 20 bp, Artificial
  Synthetically generated peptide
tggtcggcagctggctttca

SEQ ID NO: 10170 - DNA, 20 bp, Artificial
  Synthetically generated peptide
ggtcggcagctggctttcag

SEQ ID NO: 10171 - DNA, 20 bp, Artificial
  Synthetically generated peptide
gtcggcagctggctttcaga

SEQ ID NO: 10172 - DNA, 20 bp, Artificial
  Synthetically generated peptide
tcggcagctggctttcagag

SEQ ID NO: 10173 - DNA, 20 bp, Artificial
  Synthetically generated peptide
cggcagctggctttcagagc

SEQ ID NO: 10174 - DNA, 20 bp, Artificial
  Synthetically generated peptide
cctccgtgtggggctctggt

SEQ ID NO: 10175 - DNA, 20 bp, Artificial
  Synthetically generated peptide
gcctccgtgtggggctctgg

SEQ ID NO: 10176 - DNA, 20 bp, Artificial
  Synthetically generated peptide
tgcctccgtgtggggctctg

SEQ ID NO: 10177 - DNA, 20 bp, Artificial
  Synthetically generated peptide
atgcctccgtgtggggctct

SEQ ID NO: 10178 - DNA, 20 bp, Artificial
  Synthetically generated peptide
gatgcctccgtgtggggctc

SEQ ID NO: 10179 - DNA, 20 bp, Artificial
  Synthetically generated peptide
agatgcctccgtgtggggct

SEQ ID NO: 10180 - DNA, 20 bp, Artificial
  Synthetically generated peptide
cagatgcctccgtgtggggc

SEQ ID NO: 10181 - DNA, 20 bp, Artificial
  Synthetically generated peptide
gcagatgcctccgtgtgggg

SEQ ID NO: 10182 - DNA, 20 bp, Artificial
  Synthetically generated peptide
tgcagatgcctccgtgtggg

SEQ ID NO: 10183 - DNA, 20 bp, Artificial
  Synthetically generated peptide
gtgcagatgcctccgtgtgg

SEQ ID NO: 10184 - DNA, 20 bp, Artificial
  Synthetically generated peptide
ggtgcagatgcctccgtgtg

SEQ ID NO: 10185 - DNA, 20 bp, Artificial
  Synthetically generated peptide
gggtgcagatgcctccgtgt

SEQ ID NO: 10186 - DNA, 20 bp, Artificial
  Synthetically generated peptide
agggtgcagatgcctccgtg

SEQ ID NO: 10187 - DNA, 20 bp, Artificial
  Synthetically generated peptide
gagggtgcagatgcctccgt

SEQ ID NO: 10188 - DNA, 20 bp, Artificial
  Synthetically generated peptide
cgagggtgcagatgcctccg

SEQ ID NO: 10189 - DNA, 20 bp, Artificial
  Synthetically generated peptide
tcgagggtgcagatgcctcc

SEQ ID NO: 10190 - DNA, 20 bp, Artificial
  Synthetically generated peptide
atcgagggtgcagatgcctc

SEQ ID NO: 10191 - DNA, 20 bp, Artificial
  Synthetically generated peptide
catcgagggtgcagatgcct

SEQ ID NO: 10192 - DNA, 20 bp, Artificial
  Synthetically generated peptide
tcatcgagggtgcagatgcc

SEQ ID NO: 10193 - DNA, 20 bp, Artificial
  Synthetically generated peptide
ttcatcgagggtgcagatgc

SEQ ID NO: 10194 - DNA, 20 bp, Artificial
  Synthetically generated peptide
cttcatcgagggtgcagatg

SEQ ID NO: 10195 - DNA, 20 bp, Artificial
  Synthetically generated peptide
gcttcatcgagggtgcagat

SEQ ID NO: 10196 - DNA, 20 bp, Artificial
  Synthetically generated peptide
ggcttcatcgagggtgcaga

SEQ ID NO: 10197 - DNA, 20 bp, Artificial
  Synthetically generated peptide
gggcttcatcgagggtgcag

SEQ ID NO: 10198 - DNA, 20 bp, Artificial
  Synthetically generated peptide
tgggcttcatcgagggtgca

SEQ ID NO: 10199 - DNA, 20 bp, Artificial
  Synthetically generated peptide
ttgggcttcatcgagggtgc

SEQ ID NO: 10200 - DNA, 20 bp, Artificial
  Synthetically generated peptide
attgggcttcatcgagggtg

SEQ ID NO: 10201 - DNA, 20 bp, Artificial
  Synthetically generated peptide
tattgggcttcatcgagggt

SEQ ID NO: 10202 - DNA, 20 bp, Artificial
  Synthetically generated peptide
ttattgggcttcatcgaggg

SEQ ID NO: 10203 - DNA, 20 bp, Artificial
  Synthetically generated peptide
tttattgggcttcatcgagg

SEQ ID NO: 10204 - DNA, 20 bp, Artificial
  Synthetically generated peptide
gtttattgggcttcatcgag

SEQ ID NO: 10205 - DNA, 20 bp, Artificial
  Synthetically generated peptide
ggtttattgggcttcatcga

SEQ ID NO: 10206 - DNA, 20 bp, Artificial
  Synthetically generated peptide
aggtttattgggcttcatcg

SEQ ID NO: 10207 - DNA, 28 bp, Artificial
  Synthetically generated peptide
cgcagccccgtggtacatcgagtgcagc

SEQ ID NO: 10208 - DNA, 20 bp, Artificial
  Synthetically generated peptide
gcagccccgtggtacatcga

SEQ ID NO: 10209 - DNA, 20 bp, Artificial
  Synthetically generated peptide
cagccccgtggtacatcgag

SEQ ID NO: 10210 - DNA, 20 bp, Artificial
  Synthetically generated peptide
agccccgtggtacatcgagt

SEQ ID NO: 10211 - DNA, 20 bp, Artificial
  Synthetically generated peptide
gccccgtggtacatcgagtg

SEQ ID NO: 10212 - DNA, 20 bp, Artificial
  Synthetically generated peptide
ccccgtggtacatcgagtgc

SEQ ID NO: 10213 - DNA, 20 bp, Artificial
  Synthetically generated peptide
cccgtggtacatcgagtgca

SEQ ID NO: 10214 - DNA, 20 bp, Artificial
  Synthetically generated peptide
ccgtggtacatcgagtgcag

SEQ ID NO: 10215 - DNA, 20 bp, Artificial
  Synthetically generated peptide
cgtggtacatcgagtgcagc

SEQ ID NO: 10216 - DNA, 20 bp, Artificial
  Synthetically generated peptide
gtggtacatcgagtgcagcc

SEQ ID NO: 10217 - DNA, 20 bp, Artificial
  Synthetically generated peptide
tggtacatcgagtgcagcca

SEQ ID NO: 10218 - DNA, 20 bp, Artificial
  Synthetically generated peptide
ggtacatcgagtgcagccag

SEQ ID NO: 10219 - DNA, 20 bp, Artificial
  Synthetically generated peptide
gtacatcgagtgcagccagg

SEQ ID NO: 10220 - DNA, 20 bp, Artificial
  Synthetically generated peptide
tacatcgagtgcagccaggg

SEQ ID NO: 10221 - DNA, 20 bp, Artificial
  Synthetically generated peptide
acatcgagtgcagccagggt

SEQ ID NO: 10222 - DNA, 20 bp, Artificial
  Synthetically generated peptide
catcgagtgcagccagggtt

SEQ ID NO: 10223 - DNA, 20 bp, Artificial
  Synthetically generated peptide
atcgagtgcagccagggttc

SEQ ID NO: 10224 - DNA, 20 bp, Artificial
  Synthetically generated peptide
tcgagtgcagccagggttcc

SEQ ID NO: 10225 - DNA, 20 bp, Artificial
  Synthetically generated peptide
cgagtgcagccagggttcct

SEQ ID NO: 10226 - DNA, 20 bp, Artificial
  Synthetically generated peptide
acgcagccccgtggtacatc

SEQ ID NO: 10227 - DNA, 20 bp, Artificial
  Synthetically generated peptide
aacgcagccccgtggtacat

SEQ ID NO: 10228 - DNA, 20 bp, Artificial
  Synthetically generated peptide
gaacgcagccccgtggtaca

SEQ ID NO: 10229 - DNA, 20 bp, Artificial
  Synthetically generated peptide
ggaacgcagccccgtggtac

SEQ ID NO: 10230 - DNA, 20 bp, Artificial
  Synthetically generated peptide
tggaacgcagccccgtggta

SEQ ID NO: 10231 - DNA, 20 bp, Artificial
  Synthetically generated peptide
ctggaacgcagccccgtggt

SEQ ID NO: 10232 - DNA, 20 bp, Artificial
  Synthetically generated peptide
gctggaacgcagccccgtgg

SEQ ID NO: 10233 - DNA, 20 bp, Artificial
  Synthetically generated peptide
agctggaacgcagccccgtg

SEQ ID NO: 10234 - DNA, 20 bp, Artificial
  Synthetically generated peptide
gagctggaacgcagccccgt

SEQ ID NO: 10235 - DNA, 20 bp, Artificial
  Synthetically generated peptide
tgagctggaacgcagccccg

SEQ ID NO: 10236 - DNA, 20 bp, Artificial
  Synthetically generated peptide
gtgagctggaacgcagcccc

SEQ ID NO: 10237 - DNA, 20 bp, Artificial
  Synthetically generated peptide
ggtgagctggaacgcagccc

SEQ ID NO: 10238 - DNA, 20 bp, Artificial
  Synthetically generated peptide
gggtgagctggaacgcagcc

SEQ ID NO: 10239 - DNA, 20 bp, Artificial
  Synthetically generated peptide
tgggtgagctggaacgcagc

SEQ ID NO: 10240 - DNA, 20 bp, Artificial
  Synthetically generated peptide
ctgggtgagctggaacgcag

SEQ ID NO: 10241 - DNA, 20 bp, Artificial
  Synthetically generated peptide
cctgggtgagctggaacgca

SEQ ID NO: 10242 - DNA, 20 bp, Artificial
  Synthetically generated peptide
ccctgggtgagctggaacgc

SEQ ID NO: 10243 - DNA, 20 bp, Artificial
  Synthetically generated peptide
tccctgggtgagctggaacg

SEQ ID NO: 10244 - DNA, 27 bp, Artificial
  Synthetically generated peptide
gcgctctcggtggggaacattcaacac

SEQ ID NO: 10245 - DNA, 20 bp, Artificial
  Synthetically generated peptide
cgctctcggtggggaacatt

SEQ ID NO: 10246 - DNA, 20 bp, Artificial
  Synthetically generated peptide
gctctcggtggggaacattc

SEQ ID NO: 10247 - DNA, 20 bp, Artificial
  Synthetically generated peptide
ctctcggtggggaacattca

SEQ ID NO: 10248 - DNA, 20 bp, Artificial
  Synthetically generated peptide
tctcggtggggaacattcaa

SEQ ID NO: 10249 - DNA, 20 bp, Artificial
  Synthetically generated peptide
ctcggtggggaacattcaac

SEQ ID NO: 10250 - DNA, 20 bp, Artificial
  Synthetically generated peptide
tcggtggggaacattcaaca

SEQ ID NO: 10251 - DNA, 20 bp, Artificial
  Synthetically generated peptide
cggtggggaacattcaacac

SEQ ID NO: 10252 - DNA, 24 bp, Artificial
  Synthetically generated peptide
cgggatgcgacggttggccaacgg

SEQ ID NO: 10253 - DNA, 20 bp, Artificial
  Synthetically generated peptide
gggatgcgacggttggccaa

SEQ ID NO: 10254 - DNA, 20 bp, Artificial
  Synthetically generated peptide
ggatgcgacggttggccaac

SEQ ID NO: 10255 - DNA, 20 bp, Artificial
  Synthetically generated peptide
gatgcgacggttggccaacg

SEQ ID NO: 10256 - DNA, 20 bp, Artificial
  Synthetically generated peptide
atgcgacggttggccaacgg

SEQ ID NO: 10257 - DNA, 20 bp, Artificial
  Synthetically generated peptide
tgcgacggttggccaacggg

SEQ ID NO: 10258 - DNA, 20 bp, Artificial
  Synthetically generated peptide
gcgacggttggccaacgggg

SEQ ID NO: 10259 - DNA, 20 bp, Artificial
  Synthetically generated peptide
cgacggttggccaacgggga

SEQ ID NO: 10260 - DNA, 20 bp, Artificial
  Synthetically generated peptide
acgggatgcgacggttggcc

SEQ ID NO: 10261 - DNA, 20 bp, Artificial
  Synthetically generated peptide
cacgggatgcgacggttggc

SEQ ID NO: 10262 - DNA, 20 bp, Artificial
  Synthetically generated peptide
gcacgggatgcgacggttgg

SEQ ID NO: 10263 - DNA, 20 bp, Artificial
  Synthetically generated peptide
tgcacgggatgcgacggttg

SEQ ID NO: 10264 - DNA, 20 bp, Artificial
  Synthetically generated peptide
ttgcacgggatgcgacggtt

SEQ ID NO: 10265 - DNA, 20 bp, Artificial
  Synthetically generated peptide
gttgcacgggatgcgacggt

SEQ ID NO: 10266 - DNA, 20 bp, Artificial
  Synthetically generated peptide
agttgcacgggatgcgacgg

SEQ ID NO: 10267 - DNA, 20 bp, Artificial
  Synthetically generated peptide
aagttgcacgggatgcgacg

SEQ ID NO: 10268 - DNA, 20 bp, Artificial
  Synthetically generated peptide
aaagttgcacgggatgcgac

SEQ ID NO: 10269 - DNA, 20 bp, Artificial
  Synthetically generated peptide
caaagttgcacgggatgcga

SEQ ID NO: 10270 - DNA, 20 bp, Artificial
  Synthetically generated peptide
ccaaagttgcacgggatgcg

SEQ ID NO: 10271 - DNA, 20 bp, Artificial
  Synthetically generated peptide
cccaaagttgcacgggatgc

SEQ ID NO: 10272 - DNA, 20 bp, Artificial
  Synthetically generated peptide
ccccaaagttgcacgggatg

SEQ ID NO: 10273 - DNA, 20 bp, Artificial
  Synthetically generated peptide
accccaaagttgcacgggat

SEQ ID NO: 10274 - DNA, 20 bp, Artificial
  Synthetically generated peptide
taccccaaagttgcacggga

SEQ ID NO: 10275 - DNA, 20 bp, Artificial
  Synthetically generated peptide
ctaccccaaagttgcacggg

SEQ ID NO: 10276 - DNA, 20 bp, Artificial
  Synthetically generated peptide
actaccccaaagttgcacgg

SEQ ID NO: 10277 - DNA, 20 bp, Artificial
  Synthetically generated peptide
cactaccccaaagttgcacg

SEQ ID NO: 10278 - DNA, 25 bp, Artificial
  Synthetically generated peptide
cgcagcgtgtccggcgccagcgggc

SEQ ID NO: 10279 - DNA, 20 bp, Artificial
  Synthetically generated peptide
gcagcgtgtccggcgccagc

SEQ ID NO: 10280 - DNA, 20 bp, Artificial
  Synthetically generated peptide
cagcgtgtccggcgccagcg

SEQ ID NO: 10281 - DNA, 20 bp, Artificial
  Synthetically generated peptide
agcgtgtccggcgccagcgg

SEQ ID NO: 10282 - DNA, 20 bp, Artificial
  Synthetically generated peptide
gcgtgtccggcgccagcggg

SEQ ID NO: 10283 - DNA, 20 bp, Artificial
  Synthetically generated peptide
cgtgtccggcgccagcgggc

SEQ ID NO: 10284 - DNA, 20 bp, Artificial
  Synthetically generated peptide
gtgtccggcgccagcgggct

SEQ ID NO: 10285 - DNA, 20 bp, Artificial
  Synthetically generated peptide
tgtccggcgccagcgggcta

SEQ ID NO: 10286 - DNA, 20 bp, Artificial
  Synthetically generated peptide
gtccggcgccagcgggctaa

SEQ ID NO: 10287 - DNA, 20 bp, Artificial
  Synthetically generated peptide
tccggcgccagcgggctaaa

SEQ ID NO: 10288 - DNA, 20 bp, Artificial
  Synthetically generated peptide
ccggcgccagcgggctaaag

SEQ ID NO: 10289 - DNA, 20 bp, Artificial
  Synthetically generated peptide
cggcgccagcgggctaaagg

SEQ ID NO: 10290 - DNA, 20 bp, Artificial
  Synthetically generated peptide
gcgcagcgtgtccggcgcca

SEQ ID NO: 10291 - DNA, 20 bp, Artificial
  Synthetically generated peptide
ggcgcagcgtgtccggcgcc

SEQ ID NO: 10292 - DNA, 20 bp, Artificial
  Synthetically generated peptide
aggcgcagcgtgtccggcgc

SEQ ID NO: 10293 - DNA, 20 bp, Artificial
  Synthetically generated peptide
gaggcgcagcgtgtccggcg

SEQ ID NO: 10294 - DNA, 20 bp, Artificial
  Synthetically generated peptide
tgaggcgcagcgtgtccggc

SEQ ID NO: 10295 - DNA, 20 bp, Artificial
  Synthetically generated peptide
atgaggcgcagcgtgtccgg

SEQ ID NO: 10296 - DNA, 20 bp, Artificial
  Synthetically generated peptide
gatgaggcgcagcgtgtccg

SEQ ID NO: 10297 - DNA, 20 bp, Artificial
  Synthetically generated peptide
agatgaggcgcagcgtgtcc

SEQ ID NO: 10298 - DNA, 20 bp, Artificial
  Synthetically generated peptide
gagatgaggcgcagcgtgtc

SEQ ID NO: 10299 - DNA, 25 bp, Artificial
  Synthetically generated peptide
cggcccaccgcgggcggagcgttcg

SEQ ID NO: 10300 - DNA, 20 bp, Artificial
  Synthetically generated peptide
ggcccaccgcgggcggagcg

SEQ ID NO: 10301 - DNA, 20 bp, Artificial
  Synthetically generated peptide
gcccaccgcgggcggagcgt

SEQ ID NO: 10302 - DNA, 20 bp, Artificial
  Synthetically generated peptide
cccaccgcgggcggagcgtt

SEQ ID NO: 10303 - DNA, 20 bp, Artificial
  Synthetically generated peptide
ccaccgcgggcggagcgttc

SEQ ID NO: 10304 - DNA, 20 bp, Artificial
  Synthetically generated peptide
caccgcgggcggagcgttcg

SEQ ID NO: 10305 - DNA, 20 bp, Artificial
  Synthetically generated peptide
accgcgggcggagcgttcgg

SEQ ID NO: 10306 - DNA, 20 bp, Artificial
  Synthetically generated peptide
ccgcgggcggagcgttcggg

SEQ ID NO: 10307 - DNA, 20 bp, Artificial
  Synthetically generated peptide
cgcgggcggagcgttcgggc

SEQ ID NO: 10308 - DNA, 20 bp, Artificial
  Synthetically generated peptide
gcgggcggagcgttcgggcc

SEQ ID NO: 10309 - DNA, 20 bp, Artificial
  Synthetically generated peptide
cgggcggagcgttcgggccg

SEQ ID NO: 10310 - DNA, 20 bp, Artificial
  Synthetically generated peptide
gggcggagcgttcgggccgg

SEQ ID NO: 10311 - DNA, 20 bp, Artificial
  Synthetically generated peptide
ggcggagcgttcgggccggc

SEQ ID NO: 10312 - DNA, 20 bp, Artificial
  Synthetically generated peptide
gcggagcgttcgggccggcc

SEQ ID NO: 10313 - DNA, 20 bp, Artificial
  Synthetically generated peptide
cggagcgttcgggccggcct

SEQ ID NO: 10314 - DNA, 20 bp, Artificial
  Synthetically generated peptide
ggagcgttcgggccggcctg

SEQ ID NO: 10315 - DNA, 20 bp, Artificial
  Synthetically generated peptide
gagcgttcgggccggcctgg

SEQ ID NO: 10316 - DNA, 20 bp, Artificial
  Synthetically generated peptide
agcgttcgggccggcctggg

SEQ ID NO: 10317 - DNA, 20 bp, Artificial
  Synthetically generated peptide
gcgttcgggccggcctggga

SEQ ID NO: 10318 - DNA, 20 bp, Artificial
  Synthetically generated peptide
cgttcgggccggcctgggat

SEQ ID NO: 10319 - DNA, 20 bp, Artificial
  Synthetically generated peptide
gttcgggccggcctgggatg

SEQ ID NO: 10320 - DNA, 20 bp, Artificial
  Synthetically generated peptide
ttcgggccggcctgggatgc

SEQ ID NO: 10321 - DNA, 20 bp, Artificial
  Synthetically generated peptide
tcgggccggcctgggatgcc

SEQ ID NO: 10322 - DNA, 20 bp, Artificial
  Synthetically generated peptide
cgggccggcctgggatgccg

SEQ ID NO: 10323 - DNA, 20 bp, Artificial
  Synthetically generated peptide
gggccggcctgggatgccgc

SEQ ID NO: 10324 - DNA, 20 bp, Artificial
  Synthetically generated peptide
ggccggcctgggatgccgcg

SEQ ID NO: 10325 - DNA, 20 bp, Artificial
  Synthetically generated peptide
gccggcctgggatgccgcgc

SEQ ID NO: 10326 - DNA, 20 bp, Artificial
  Synthetically generated peptide
ccggcctgggatgccgcgca

SEQ ID NO: 10327 - DNA, 20 bp, Artificial
  Synthetically generated peptide
cggcctgggatgccgcgcac

SEQ ID NO: 10328 - DNA, 20 bp, Artificial
  Synthetically generated peptide
ggcctgggatgccgcgcact

SEQ ID NO: 10329 - DNA, 20 bp, Artificial
  Synthetically generated peptide
gcctgggatgccgcgcactc

SEQ ID NO: 10330 - DNA, 20 bp, Artificial
  Synthetically generated peptide
cctgggatgccgcgcactcg

SEQ ID NO: 10331 - DNA, 20 bp, Artificial
  Synthetically generated peptide
ctgggatgccgcgcactcgc

SEQ ID NO: 10332 - DNA, 20 bp, Artificial
  Synthetically generated peptide
tgggatgccgcgcactcgcc

SEQ ID NO: 10333 - DNA, 20 bp, Artificial
  Synthetically generated peptide
gggatgccgcgcactcgccc

SEQ ID NO: 10334 - DNA, 20 bp, Artificial
  Synthetically generated peptide
ggatgccgcgcactcgcccg

SEQ ID NO: 10335 - DNA, 20 bp, Artificial
  Synthetically generated peptide
gatgccgcgcactcgcccgg

SEQ ID NO: 10336 - DNA, 20 bp, Artificial
  Synthetically generated peptide
atgccgcgcactcgcccggc

SEQ ID NO: 10337 - DNA, 20 bp, Artificial
  Synthetically generated peptide
tgccgcgcactcgcccggcc

SEQ ID NO: 10338 - DNA, 20 bp, Artificial
  Synthetically generated peptide
gccgcgcactcgcccggccc

SEQ ID NO: 10339 - DNA, 20 bp, Artificial
  Synthetically generated peptide
ccgcgcactcgcccggcccc

SEQ ID NO: 10340 - DNA, 20 bp, Artificial
  Synthetically generated peptide
cgcgcactcgcccggcccca

SEQ ID NO: 10341 - DNA, 20 bp, Artificial
  Synthetically generated peptide
gcgcactcgcccggccccac

SEQ ID NO: 10342 - DNA, 20 bp, Artificial
  Synthetically generated peptide
cgcactcgcccggccccact

SEQ ID NO: 10343 - DNA, 20 bp, Artificial
  Synthetically generated peptide
gcactcgcccggccccactc

SEQ ID NO: 10344 - DNA, 20 bp, Artificial
  Synthetically generated peptide
cactcgcccggccccactcc

SEQ ID NO: 10345 - DNA, 20 bp, Artificial
  Synthetically generated peptide
actcgcccggccccactccc

SEQ ID NO: 10346 - DNA, 20 bp, Artificial
  Synthetically generated peptide
ctcgcccggccccactcccg

SEQ ID NO: 10347 - DNA, 20 bp, Artificial
  Synthetically generated peptide
tcgcccggccccactcccgg

SEQ ID NO: 10348 - DNA, 20 bp, Artificial
  Synthetically generated peptide
cgcccggccccactcccggt

SEQ ID NO: 10349 - DNA, 20 bp, Artificial
  Synthetically generated peptide
gcccggccccactcccggtt

SEQ ID NO: 10350 - DNA, 20 bp, Artificial
  Synthetically generated peptide
cccggccccactcccggttt

SEQ ID NO: 10351 - DNA, 20 bp, Artificial
  Synthetically generated peptide
ccggccccactcccggtttc

SEQ ID NO: 10352 - DNA, 20 bp, Artificial
  Synthetically generated peptide
cggccccactcccggtttct

SEQ ID NO: 10353 - DNA, 20 bp, Artificial
  Synthetically generated peptide
ggccccactcccggtttctg

SEQ ID NO: 10354 - DNA, 20 bp, Artificial
  Synthetically generated peptide
gccccactcccggtttctgc

SEQ ID NO: 10355 - DNA, 20 bp, Artificial
  Synthetically generated peptide
ccccactcccggtttctgcc

SEQ ID NO: 10356 - DNA, 20 bp, Artificial
  Synthetically generated peptide
cccactcccggtttctgccg

SEQ ID NO: 10357 - DNA, 20 bp, Artificial
  Synthetically generated peptide
ccactcccggtttctgccgc

SEQ ID NO: 10358 - DNA, 20 bp, Artificial
  Synthetically generated peptide
cactcccggtttctgccgcc

SEQ ID NO: 10359 - DNA, 20 bp, Artificial
  Synthetically generated peptide
actcccggtttctgccgcca

SEQ ID NO: 10360 - DNA, 20 bp, Artificial
  Synthetically generated peptide
ctcccggtttctgccgccag

SEQ ID NO: 10361 - DNA, 20 bp, Artificial
  Synthetically generated peptide
tcccggtttctgccgccagc

SEQ ID NO: 10362 - DNA, 20 bp, Artificial
  Synthetically generated peptide
cccggtttctgccgccagcc

SEQ ID NO: 10363 - DNA, 20 bp, Artificial
  Synthetically generated peptide
ccggtttctgccgccagccg

SEQ ID NO: 10364 - DNA, 20 bp, Artificial
  Synthetically generated peptide
cggtttctgccgccagccgg

SEQ ID NO: 10365 - DNA, 20 bp, Artificial
  Synthetically generated peptide
ggtttctgccgccagccggg

SEQ ID NO: 10366 - DNA, 20 bp, Artificial
  Synthetically generated peptide
gtttctgccgccagccggga

SEQ ID NO: 10367 - DNA, 20 bp, Artificial
  Synthetically generated peptide
tttctgccgccagccgggag

SEQ ID NO: 10368 - DNA, 20 bp, Artificial
  Synthetically generated peptide
ttctgccgccagccgggagc

SEQ ID NO: 10369 - DNA, 20 bp, Artificial
  Synthetically generated peptide
tctgccgccagccgggagct

SEQ ID NO: 10370 - DNA, 20 bp, Artificial
  Synthetically generated peptide
ctgccgccagccgggagctt

SEQ ID NO: 10371 - DNA, 20 bp, Artificial
  Synthetically generated peptide
tgccgccagccgggagcttc

SEQ ID NO: 10372 - DNA, 20 bp, Artificial
  Synthetically generated peptide
gccgccagccgggagcttcg

SEQ ID NO: 10373 - DNA, 20 bp, Artificial
  Synthetically generated peptide
ccgccagccgggagcttcgg

SEQ ID NO: 10374 - DNA, 20 bp, Artificial
  Synthetically generated peptide
cgccagccgggagcttcggg

SEQ ID NO: 10375 - DNA, 20 bp, Artificial
  Synthetically generated peptide
gccagccgggagcttcgggt

SEQ ID NO: 10376 - DNA, 20 bp, Artificial
  Synthetically generated peptide
ccagccgggagcttcgggtg

SEQ ID NO: 10377 - DNA, 20 bp, Artificial
  Synthetically generated peptide
cagccgggagcttcgggtgc

SEQ ID NO: 10378 - DNA, 20 bp, Artificial
  Synthetically generated peptide
agccgggagcttcgggtgct

SEQ ID NO: 10379 - DNA, 20 bp, Artificial
  Synthetically generated peptide
gccgggagcttcgggtgctc

SEQ ID NO: 10380 - DNA, 20 bp, Artificial
  Synthetically generated peptide
ccgggagcttcgggtgctcg

SEQ ID NO: 10381 - DNA, 20 bp, Artificial
  Synthetically generated peptide
cgggagcttcgggtgctcgc

SEQ ID NO: 10382 - DNA, 20 bp, Artificial
  Synthetically generated peptide
gggagcttcgggtgctcgcg

SEQ ID NO: 10383 - DNA, 20 bp, Artificial
  Synthetically generated peptide
ggagcttcgggtgctcgcgc

SEQ ID NO: 10384 - DNA, 20 bp, Artificial
  Synthetically generated peptide
gagcttcgggtgctcgcgct

SEQ ID NO: 10385 - DNA, 20 bp, Artificial
  Synthetically generated peptide
agcttcgggtgctcgcgctg

SEQ ID NO: 10386 - DNA, 20 bp, Artificial
  Synthetically generated peptide
gcttcgggtgctcgcgctgc

SEQ ID NO: 10387 - DNA, 20 bp, Artificial
  Synthetically generated peptide
cttcgggtgctcgcgctgct

SEQ ID NO: 10388 - DNA, 20 bp, Artificial
  Synthetically generated peptide
ttcgggtgctcgcgctgctt

SEQ ID NO: 10389 - DNA, 20 bp, Artificial
  Synthetically generated peptide
tcgggtgctcgcgctgcttc

SEQ ID NO: 10390 - DNA, 20 bp, Artificial
  Synthetically generated peptide
cgggtgctcgcgctgcttct

SEQ ID NO: 10391 - DNA, 20 bp, Artificial
  Synthetically generated peptide
gggtgctcgcgctgcttctc

SEQ ID NO: 10392 - DNA, 20 bp, Artificial
  Synthetically generated peptide
ggtgctcgcgctgcttctcc

SEQ ID NO: 10393 - DNA, 20 bp, Artificial
  Synthetically generated peptide
gtgctcgcgctgcttctccg

SEQ ID NO: 10394 - DNA, 20 bp, Artificial
  Synthetically generated peptide
tgctcgcgctgcttctccgg

SEQ ID NO: 10395 - DNA, 20 bp, Artificial
  Synthetically generated peptide
gctcgcgctgcttctccggg

SEQ ID NO: 10396 - DNA, 20 bp, Artificial
  Synthetically generated peptide
ctcgcgctgcttctccgggt

SEQ ID NO: 10397 - DNA, 20 bp, Artificial
  Synthetically generated peptide
tcgcgctgcttctccgggta

SEQ ID NO: 10398 - DNA, 20 bp, Artificial
  Synthetically generated peptide
cgcgctgcttctccgggtac

SEQ ID NO: 10399 - DNA, 20 bp, Artificial
  Synthetically generated peptide
gcgctgcttctccgggtacg

SEQ ID NO: 10400 - DNA, 20 bp, Artificial
  Synthetically generated peptide
cgctgcttctccgggtacgg

SEQ ID NO: 10401 - DNA, 20 bp, Artificial
  Synthetically generated peptide
gctgcttctccgggtacggg

SEQ ID NO: 10402 - DNA, 20 bp, Artificial
  Synthetically generated peptide
ctgcttctccgggtacgggc

SEQ ID NO: 10403 - DNA, 20 bp, Artificial
  Synthetically generated peptide
tgcttctccgggtacgggcc

SEQ ID NO: 10404 - DNA, 20 bp, Artificial
  Synthetically generated peptide
gcttctccgggtacgggccg

SEQ ID NO: 10405 - DNA, 20 bp, Artificial
  Synthetically generated peptide
cttctccgggtacgggccgc

SEQ ID NO: 10406 - DNA, 20 bp, Artificial
  Synthetically generated peptide
ttctccgggtacgggccgct

SEQ ID NO: 10407 - DNA, 20 bp, Artificial
  Synthetically generated peptide
tctccgggtacgggccgctg

SEQ ID NO: 10408 - DNA, 20 bp, Artificial
  Synthetically generated peptide
ctccgggtacgggccgctgg

SEQ ID NO: 10409 - DNA, 20 bp, Artificial
  Synthetically generated peptide
tccgggtacgggccgctggg

SEQ ID NO: 10410 - DNA, 20 bp, Artificial
  Synthetically generated peptide
ccgggtacgggccgctgggt

SEQ ID NO: 10411 - DNA, 20 bp, Artificial
  Synthetically generated peptide
cgggtacgggccgctgggtg

SEQ ID NO: 10412 - DNA, 20 bp, Artificial
  Synthetically generated peptide
gggtacgggccgctgggtgg

SEQ ID NO: 10413 - DNA, 20 bp, Artificial
  Synthetically generated peptide
ggtacgggccgctgggtggg

SEQ ID NO: 10414 - DNA, 20 bp, Artificial
  Synthetically generated peptide
gtacgggccgctgggtgggg

SEQ ID NO: 10415 - DNA, 20 bp, Artificial
  Synthetically generated peptide
tacgggccgctgggtggggt

SEQ ID NO: 10416 - DNA, 20 bp, Artificial
  Synthetically generated peptide
acgggccgctgggtggggtc

SEQ ID NO: 10417 - DNA, 20 bp, Artificial
  Synthetically generated peptide
cgggccgctgggtggggtcc

SEQ ID NO: 10418 - DNA, 20 bp, Artificial
  Synthetically generated peptide
gggccgctgggtggggtccc

SEQ ID NO: 10419 - DNA, 20 bp, Artificial
  Synthetically generated peptide
ggccgctgggtggggtcccg

SEQ ID NO: 10420 - DNA, 20 bp, Artificial
  Synthetically generated peptide
gccgctgggtggggtcccgg

SEQ ID NO: 10421 - DNA, 20 bp, Artificial
  Synthetically generated peptide
ccgctgggtggggtcccggg

SEQ ID NO: 10422 - DNA, 20 bp, Artificial
  Synthetically generated peptide
cgctgggtggggtcccgggc

SEQ ID NO: 10423 - DNA, 20 bp, Artificial
  Synthetically generated peptide
gctgggtggggtcccgggcg

SEQ ID NO: 10424 - DNA, 20 bp, Artificial
  Synthetically generated peptide
ctgggtggggtcccgggcgt

SEQ ID NO: 10425 - DNA, 20 bp, Artificial
  Synthetically generated peptide
tgggtggggtcccgggcgtg

SEQ ID NO: 10426 - DNA, 20 bp, Artificial
  Synthetically generated peptide
gggtggggtcccgggcgtgg

SEQ ID NO: 10427 - DNA, 20 bp, Artificial
  Synthetically generated peptide
ggtggggtcccgggcgtggt

SEQ ID NO: 10428 - DNA, 20 bp, Artificial
  Synthetically generated peptide
gtggggtcccgggcgtggtg

SEQ ID NO: 10429 - DNA, 20 bp, Artificial
  Synthetically generated peptide
tggggtcccgggcgtggtgc

SEQ ID NO: 10430 - DNA, 20 bp, Artificial
  Synthetically generated peptide
ggggtcccgggcgtggtgcg

SEQ ID NO: 10431 - DNA, 20 bp, Artificial
  Synthetically generated peptide
gggtcccgggcgtggtgcgg

SEQ ID NO: 10432 - DNA, 20 bp, Artificial
  Synthetically generated peptide
ggtcccgggcgtggtgcgga

SEQ ID NO: 10433 - DNA, 20 bp, Artificial
  Synthetically generated peptide
gtcccgggcgtggtgcggag

SEQ ID NO: 10434 - DNA, 20 bp, Artificial
  Synthetically generated peptide
tcccgggcgtggtgcggagg

SEQ ID NO: 10435 - DNA, 20 bp, Artificial
  Synthetically generated peptide
cccgggcgtggtgcggaggc

SEQ ID NO: 10436 - DNA, 20 bp, Artificial
  Synthetically generated peptide
ccgggcgtggtgcggaggcg

SEQ ID NO: 10437 - DNA, 20 bp, Artificial
  Synthetically generated peptide
cgggcgtggtgcggaggcgc

SEQ ID NO: 10438 - DNA, 20 bp, Artificial
  Synthetically generated peptide
tcggcccaccgcgggcggag

SEQ ID NO: 10439 - DNA, 20 bp, Artificial
  Synthetically generated peptide
gtcggcccaccgcgggcgga

SEQ ID NO: 10440 - DNA, 20 bp, Artificial
  Synthetically generated peptide
agtcggcccaccgcgggcgg

SEQ ID NO: 10441 - DNA, 20 bp, Artificial
  Synthetically generated peptide
aagtcggcccaccgcgggcg

SEQ ID NO: 10442 - DNA, 20 bp, Artificial
  Synthetically generated peptide
gaagtcggcccaccgcgggc

SEQ ID NO: 10443 - DNA, 20 bp, Artificial
  Synthetically generated peptide
ggaagtcggcccaccgcggg

SEQ ID NO: 10444 - DNA, 20 bp, Artificial
  Synthetically generated peptide
gggaagtcggcccaccgcgg

SEQ ID NO: 10445 - DNA, 20 bp, Artificial
  Synthetically generated peptide
ggggaagtcggcccaccgcg

SEQ ID NO: 10446 - DNA, 20 bp, Artificial
  Synthetically generated peptide
aggggaagtcggcccaccgc

SEQ ID NO: 10447 - DNA, 20 bp, Artificial
  Synthetically generated peptide
gaggggaagtcggcccaccg

SEQ ID NO: 10448 - DNA, 20 bp, Artificial
  Synthetically generated peptide
ggaggggaagtcggcccacc

SEQ ID NO: 10449 - DNA, 26 bp, Artificial
  Synthetically generated peptide
cgcgcactcgcccggccccactcccg

SEQ ID NO: 10450 - DNA, 20 bp, Artificial
  Synthetically generated peptide
gcgcactcgcccggccccac

SEQ ID NO: 10451 - DNA, 20 bp, Artificial
  Synthetically generated peptide
cgcactcgcccggccccact

SEQ ID NO: 10452 - DNA, 20 bp, Artificial
  Synthetically generated peptide
gcactcgcccggccccactc

SEQ ID NO: 10453 - DNA, 20 bp, Artificial
  Synthetically generated peptide
cactcgcccggccccactcc

SEQ ID NO: 10454 - DNA, 20 bp, Artificial
  Synthetically generated peptide
actcgcccggccccactccc

SEQ ID NO: 10455 - DNA, 20 bp, Artificial
  Synthetically generated peptide
ctcgcccggccccactcccg

SEQ ID NO: 10456 - DNA, 20 bp, Artificial
  Synthetically generated peptide
tcgcccggccccactcccgg

SEQ ID NO: 10457 - DNA, 20 bp, Artificial
  Synthetically generated peptide
cgcccggccccactcccggt

SEQ ID NO: 10458 - DNA, 20 bp, Artificial
  Synthetically generated peptide
gcccggccccactcccggtt

SEQ ID NO: 10459 - DNA, 20 bp, Artificial
  Synthetically generated peptide
cccggccccactcccggttt

SEQ ID NO: 10460 - DNA, 20 bp, Artificial
  Synthetically generated peptide
ccggccccactcccggtttc

SEQ ID NO: 10461 - DNA, 20 bp, Artificial
  Synthetically generated peptide
cggccccactcccggtttct

SEQ ID NO: 10462 - DNA, 20 bp, Artificial
  Synthetically generated peptide
ggccccactcccggtttctg

SEQ ID NO: 10463 - DNA, 20 bp, Artificial
  Synthetically generated peptide
gccccactcccggtttctgc

SEQ ID NO: 10464 - DNA, 20 bp, Artificial
  Synthetically generated peptide
ccccactcccggtttctgcc

SEQ ID NO: 10465 - DNA, 20 bp, Artificial
  Synthetically generated peptide
cccactcccggtttctgccg

SEQ ID NO: 10466 - DNA, 20 bp, Artificial
  Synthetically generated peptide
ccactcccggtttctgccgc

SEQ ID NO: 10467 - DNA, 20 bp, Artificial
  Synthetically generated peptide
cactcccggtttctgccgcc

SEQ ID NO: 10468 - DNA, 20 bp, Artificial
  Synthetically generated peptide
actcccggtttctgccgcca

SEQ ID NO: 10469 - DNA, 20 bp, Artificial
  Synthetically generated peptide
ctcccggtttctgccgccag

SEQ ID NO: 10470 - DNA, 20 bp, Artificial
  Synthetically generated peptide
tcccggtttctgccgccagc

SEQ ID NO: 10471 - DNA, 20 bp, Artificial
  Synthetically generated peptide
cccggtttctgccgccagcc

SEQ ID NO: 10472 - DNA, 20 bp, Artificial
  Synthetically generated peptide
ccggtttctgccgccagccg

SEQ ID NO: 10473 - DNA, 20 bp, Artificial
  Synthetically generated peptide
cggtttctgccgccagccgg

SEQ ID NO: 10474 - DNA, 20 bp, Artificial
  Synthetically generated peptide
ggtttctgccgccagccggg

SEQ ID NO: 10475 - DNA, 20 bp, Artificial
  Synthetically generated peptide
gtttctgccgccagccggga

SEQ ID NO: 10476 - DNA, 20 bp, Artificial
  Synthetically generated peptide
tttctgccgccagccgggag

SEQ ID NO: 10477 - DNA, 20 bp, Artificial
  Synthetically generated peptide
ttctgccgccagccgggagc

SEQ ID NO: 10478 - DNA, 20 bp, Artificial
  Synthetically generated peptide
tctgccgccagccgggagct

SEQ ID NO: 10479 - DNA, 20 bp, Artificial
  Synthetically generated peptide
ctgccgccagccgggagctt

SEQ ID NO: 10480 - DNA, 20 bp, Artificial
  Synthetically generated peptide
tgccgccagccgggagcttc

SEQ ID NO: 10481 - DNA, 20 bp, Artificial
  Synthetically generated peptide
gccgccagccgggagcttcg

SEQ ID NO: 10482 - DNA, 20 bp, Artificial
  Synthetically generated peptide
ccgccagccgggagcttcgg

SEQ ID NO: 10483 - DNA, 20 bp, Artificial
  Synthetically generated peptide
cgccagccgggagcttcggg

SEQ ID NO: 10484 - DNA, 20 bp, Artificial
  Synthetically generated peptide
gccagccgggagcttcgggt

SEQ ID NO: 10485 - DNA, 20 bp, Artificial
  Synthetically generated peptide
ccagccgggagcttcgggtg

SEQ ID NO: 10486 - DNA, 20 bp, Artificial
  Synthetically generated peptide
cagccgggagcttcgggtgc

SEQ ID NO: 10487 - DNA, 20 bp, Artificial
  Synthetically generated peptide
agccgggagcttcgggtgct

SEQ ID NO: 10488 - DNA, 20 bp, Artificial
  Synthetically generated peptide
gccgggagcttcgggtgctc

SEQ ID NO: 10489 - DNA, 20 bp, Artificial
  Synthetically generated peptide
ccgggagcttcgggtgctcg

SEQ ID NO: 10490 - DNA, 20 bp, Artificial
  Synthetically generated peptide
cgggagcttcgggtgctcgc

SEQ ID NO: 10491 - DNA, 20 bp, Artificial
  Synthetically generated peptide
gggagcttcgggtgctcgcg

SEQ ID NO: 10492 - DNA, 20 bp, Artificial
  Synthetically generated peptide
ggagcttcgggtgctcgcgc

SEQ ID NO: 10493 - DNA, 20 bp, Artificial
  Synthetically generated peptide
gagcttcgggtgctcgcgct

SEQ ID NO: 10494 - DNA, 20 bp, Artificial
  Synthetically generated peptide
agcttcgggtgctcgcgctg

SEQ ID NO: 10495 - DNA, 20 bp, Artificial
  Synthetically generated peptide
gcttcgggtgctcgcgctgc

SEQ ID NO: 10496 - DNA, 20 bp, Artificial
  Synthetically generated peptide
cttcgggtgctcgcgctgct

SEQ ID NO: 10497 - DNA, 20 bp, Artificial
  Synthetically generated peptide
ttcgggtgctcgcgctgctt

SEQ ID NO: 10498 - DNA, 20 bp, Artificial
  Synthetically generated peptide
tcgggtgctcgcgctgcttc

SEQ ID NO: 10499 - DNA, 20 bp, Artificial
  Synthetically generated peptide
cgggtgctcgcgctgcttct

SEQ ID NO: 10500 - DNA, 20 bp, Artificial
  Synthetically generated peptide
gggtgctcgcgctgcttctc

SEQ ID NO: 10501 - DNA, 20 bp, Artificial
  Synthetically generated peptide
ggtgctcgcgctgcttctcc

SEQ ID NO: 10502 - DNA, 20 bp, Artificial
  Synthetically generated peptide
gtgctcgcgctgcttctccg

SEQ ID NO: 10503 - DNA, 20 bp, Artificial
  Synthetically generated peptide
tgctcgcgctgcttctccgg

SEQ ID NO: 10504 - DNA, 20 bp, Artificial
  Synthetically generated peptide
gctcgcgctgcttctccggg

SEQ ID NO: 10505 - DNA, 20 bp, Artificial
  Synthetically generated peptide
ctcgcgctgcttctccgggt

SEQ ID NO: 10506 - DNA, 20 bp, Artificial
  Synthetically generated peptide
tcgcgctgcttctccgggta

SEQ ID NO: 10507 - DNA, 20 bp, Artificial
  Synthetically generated peptide
cgcgctgcttctccgggtac

SEQ ID NO: 10508 - DNA, 20 bp, Artificial
  Synthetically generated peptide
gcgctgcttctccgggtacg

SEQ ID NO: 10509 - DNA, 20 bp, Artificial
  Synthetically generated peptide
cgctgcttctccgggtacgg

SEQ ID NO: 10510 - DNA, 20 bp, Artificial
  Synthetically generated peptide
gctgcttctccgggtacggg

SEQ ID NO: 10511 - DNA, 20 bp, Artificial
  Synthetically generated peptide
ctgcttctccgggtacgggc

SEQ ID NO: 10512 - DNA, 20 bp, Artificial
  Synthetically generated peptide
tgcttctccgggtacgggcc

SEQ ID NO: 10513 - DNA, 20 bp, Artificial
  Synthetically generated peptide
gcttctccgggtacgggccg

SEQ ID NO: 10514 - DNA, 20 bp, Artificial
  Synthetically generated peptide
cttctccgggtacgggccgc

SEQ ID NO: 10515 - DNA, 20 bp, Artificial
  Synthetically generated peptide
ttctccgggtacgggccgct

SEQ ID NO: 10516 - DNA, 20 bp, Artificial
  Synthetically generated peptide
tctccgggtacgggccgctg

SEQ ID NO: 10517 - DNA, 20 bp, Artificial
  Synthetically generated peptide
ctccgggtacgggccgctgg

SEQ ID NO: 10518 - DNA, 20 bp, Artificial
  Synthetically generated peptide
tccgggtacgggccgctggg

SEQ ID NO: 10519 - DNA, 20 bp, Artificial
  Synthetically generated peptide
ccgggtacgggccgctgggt

SEQ ID NO: 10520 - DNA, 20 bp, Artificial
  Synthetically generated peptide
cgggtacgggccgctgggtg

SEQ ID NO: 10521 - DNA, 20 bp, Artificial
  Synthetically generated peptide
gggtacgggccgctgggtgg

SEQ ID NO: 10522 - DNA, 20 bp, Artificial
  Synthetically generated peptide
ggtacgggccgctgggtggg

SEQ ID NO: 10523 - DNA, 20 bp, Artificial
  Synthetically generated peptide
gtacgggccgctgggtgggg

SEQ ID NO: 10524 - DNA, 20 bp, Artificial
  Synthetically generated peptide
tacgggccgctgggtggggt

SEQ ID NO: 10525 - DNA, 20 bp, Artificial
  Synthetically generated peptide
acgggccgctgggtggggtc

SEQ ID NO: 10526 - DNA, 20 bp, Artificial
  Synthetically generated peptide
cgggccgctgggtggggtcc

SEQ ID NO: 10527 - DNA, 20 bp, Artificial
  Synthetically generated peptide
gggccgctgggtggggtccc

SEQ ID NO: 10528 - DNA, 20 bp, Artificial
  Synthetically generated peptide
ggccgctgggtggggtcccg

SEQ ID NO: 10529 - DNA, 20 bp, Artificial
  Synthetically generated peptide
gccgctgggtggggtcccgg

SEQ ID NO: 10530 - DNA, 20 bp, Artificial
  Synthetically generated peptide
ccgctgggtggggtcccggg

SEQ ID NO: 10531 - DNA, 20 bp, Artificial
  Synthetically generated peptide
cgctgggtggggtcccgggc

SEQ ID NO: 10532 - DNA, 20 bp, Artificial
  Synthetically generated peptide
gctgggtggggtcccgggcg

SEQ ID NO: 10533 - DNA, 20 bp, Artificial
  Synthetically generated peptide
ctgggtggggtcccgggcgt

SEQ ID NO: 10534 - DNA, 20 bp, Artificial
  Synthetically generated peptide
tgggtggggtcccgggcgtg

SEQ ID NO: 10535 - DNA, 20 bp, Artificial
  Synthetically generated peptide
gggtggggtcccgggcgtgg

SEQ ID NO: 10536 - DNA, 20 bp, Artificial
  Synthetically generated peptide
ggtggggtcccgggcgtggt

SEQ ID NO: 10537 - DNA, 20 bp, Artificial
  Synthetically generated peptide
gtggggtcccgggcgtggtg

SEQ ID NO: 10538 - DNA, 20 bp, Artificial
  Synthetically generated peptide
tggggtcccgggcgtggtgc

SEQ ID NO: 10539 - DNA, 20 bp, Artificial
  Synthetically generated peptide
ggggtcccgggcgtggtgcg

SEQ ID NO: 10540 - DNA, 20 bp, Artificial
  Synthetically generated peptide
gggtcccgggcgtggtgcgg

SEQ ID NO: 10541 - DNA, 20 bp, Artificial
  Synthetically generated peptide
ggtcccgggcgtggtgcgga

SEQ ID NO: 10542 - DNA, 20 bp, Artificial
  Synthetically generated peptide
gtcccgggcgtggtgcggag

SEQ ID NO: 10543 - DNA, 20 bp, Artificial
  Synthetically generated peptide
tcccgggcgtggtgcggagg

SEQ ID NO: 10544 - DNA, 20 bp, Artificial
  Synthetically generated peptide
cccgggcgtggtgcggaggc

SEQ ID NO: 10545 - DNA, 20 bp, Artificial
  Synthetically generated peptide
ccgggcgtggtgcggaggcg

SEQ ID NO: 10546 - DNA, 20 bp, Artificial
  Synthetically generated peptide
cgggcgtggtgcggaggcgc

SEQ ID NO: 10547 - DNA, 20 bp, Artificial
  Synthetically generated peptide
ccgcgcactcgcccggcccc

SEQ ID NO: 10548 - DNA, 20 bp, Artificial
  Synthetically generated peptide
gccgcgcactcgcccggccc

SEQ ID NO: 10549 - DNA, 20 bp, Artificial
  Synthetically generated peptide
tgccgcgcactcgcccggcc

SEQ ID NO: 10550 - DNA, 20 bp, Artificial
  Synthetically generated peptide
atgccgcgcactcgcccggc

SEQ ID NO: 10551 - DNA, 20 bp, Artificial
  Synthetically generated peptide
gatgccgcgcactcgcccgg

SEQ ID NO: 10552 - DNA, 20 bp, Artificial
  Synthetically generated peptide
ggatgccgcgcactcgcccg

SEQ ID NO: 10553 - DNA, 20 bp, Artificial
  Synthetically generated peptide
gggatgccgcgcactcgccc

SEQ ID NO: 10554 - DNA, 20 bp, Artificial
  Synthetically generated peptide
tgggatgccgcgcactcgcc

SEQ ID NO: 10555 - DNA, 20 bp, Artificial
  Synthetically generated peptide
ctgggatgccgcgcactcgc

SEQ ID NO: 10556 - DNA, 20 bp, Artificial
  Synthetically generated peptide
cctgggatgccgcgcactcg

SEQ ID NO: 10557 - DNA, 20 bp, Artificial
  Synthetically generated peptide
gcctgggatgccgcgcactc

SEQ ID NO: 10558 - DNA, 20 bp, Artificial
  Synthetically generated peptide
ggcctgggatgccgcgcact

SEQ ID NO: 10559 - DNA, 20 bp, Artificial
  Synthetically generated peptide
cggcctgggatgccgcgcac

SEQ ID NO: 10560 - DNA, 20 bp, Artificial
  Synthetically generated peptide
ccggcctgggatgccgcgca

SEQ ID NO: 10561 - DNA, 20 bp, Artificial
  Synthetically generated peptide
gccggcctgggatgccgcgc

SEQ ID NO: 10562 - DNA, 20 bp, Artificial
  Synthetically generated peptide
ggccggcctgggatgccgcg

SEQ ID NO: 10563 - DNA, 20 bp, Artificial
  Synthetically generated peptide
gggccggcctgggatgccgc

SEQ ID NO: 10564 - DNA, 20 bp, Artificial
  Synthetically generated peptide
cgggccggcctgggatgccg

SEQ ID NO: 10565 - DNA, 20 bp, Artificial
  Synthetically generated peptide
tcgggccggcctgggatgcc

SEQ ID NO: 10566 - DNA, 20 bp, Artificial
  Synthetically generated peptide
ttcgggccggcctgggatgc

SEQ ID NO: 10567 - DNA, 20 bp, Artificial
  Synthetically generated peptide
gttcgggccggcctgggatg

SEQ ID NO: 10568 - DNA, 20 bp, Artificial
  Synthetically generated peptide
cgttcgggccggcctgggat

SEQ ID NO: 10569 - DNA, 20 bp, Artificial
  Synthetically generated peptide
gcgttcgggccggcctggga

SEQ ID NO: 10570 - DNA, 20 bp, Artificial
  Synthetically generated peptide
agcgttcgggccggcctggg

SEQ ID NO: 10571 - DNA, 20 bp, Artificial
  Synthetically generated peptide
gagcgttcgggccggcctgg

SEQ ID NO: 10572 - DNA, 20 bp, Artificial
  Synthetically generated peptide
ggagcgttcgggccggcctg

SEQ ID NO: 10573 - DNA, 20 bp, Artificial
  Synthetically generated peptide
cggagcgttcgggccggcct

SEQ ID NO: 10574 - DNA, 20 bp, Artificial
  Synthetically generated peptide
gcggagcgttcgggccggcc

SEQ ID NO: 10575 - DNA, 20 bp, Artificial
  Synthetically generated peptide
ggcggagcgttcgggccggc

SEQ ID NO: 10576 - DNA, 20 bp, Artificial
  Synthetically generated peptide
gggcggagcgttcgggccgg

SEQ ID NO: 10577 - DNA, 20 bp, Artificial
  Synthetically generated peptide
cgggcggagcgttcgggccg

SEQ ID NO: 10578 - DNA, 20 bp, Artificial
  Synthetically generated peptide
gcgggcggagcgttcgggcc

SEQ ID NO: 10579 - DNA, 20 bp, Artificial
  Synthetically generated peptide
cgcgggcggagcgttcgggc

SEQ ID NO: 10580 - DNA, 20 bp, Artificial
  Synthetically generated peptide
ccgcgggcggagcgttcggg

SEQ ID NO: 10581 - DNA, 20 bp, Artificial
  Synthetically generated peptide
accgcgggcggagcgttcgg

SEQ ID NO: 10582 - DNA, 20 bp, Artificial
  Synthetically generated peptide
caccgcgggcggagcgttcg

SEQ ID NO: 10583 - DNA, 20 bp, Artificial
  Synthetically generated peptide
ccaccgcgggcggagcgttc

SEQ ID NO: 10584 - DNA, 20 bp, Artificial
  Synthetically generated peptide
cccaccgcgggcggagcgtt

SEQ ID NO: 10585 - DNA, 20 bp, Artificial
  Synthetically generated peptide
gcccaccgcgggcggagcgt

SEQ ID NO: 10586 - DNA, 20 bp, Artificial
  Synthetically generated peptide
ggcccaccgcgggcggagcg

SEQ ID NO: 10587 - DNA, 20 bp, Artificial
  Synthetically generated peptide
cggcccaccgcgggcggagc

SEQ ID NO: 10588 - DNA, 20 bp, Artificial
  Synthetically generated peptide
tcggcccaccgcgggcggag

SEQ ID NO: 10589 - DNA, 20 bp, Artificial
  Synthetically generated peptide
gtcggcccaccgcgggcgga

SEQ ID NO: 10590 - DNA, 20 bp, Artificial
  Synthetically generated peptide
agtcggcccaccgcgggcgg

SEQ ID NO: 10591 - DNA, 20 bp, Artificial
  Synthetically generated peptide
aagtcggcccaccgcgggcg

SEQ ID NO: 10592 - DNA, 20 bp, Artificial
  Synthetically generated peptide
gaagtcggcccaccgcgggc

SEQ ID NO: 10593 - DNA, 20 bp, Artificial
  Synthetically generated peptide
ggaagtcggcccaccgcggg

SEQ ID NO: 10594 - DNA, 20 bp, Artificial
  Synthetically generated peptide
gggaagtcggcccaccgcgg

SEQ ID NO: 10595 - DNA, 20 bp, Artificial
  Synthetically generated peptide
ggggaagtcggcccaccgcg

SEQ ID NO: 10596 - DNA, 20 bp, Artificial
  Synthetically generated peptide
aggggaagtcggcccaccgc

SEQ ID NO: 10597 - DNA, 20 bp, Artificial
  Synthetically generated peptide
gaggggaagtcggcccaccg

SEQ ID NO: 10598 - DNA, 20 bp, Artificial
  Synthetically generated peptide
ggaggggaagtcggcccacc

SEQ ID NO: 10599 - DNA, 28 bp, Artificial
  Synthetically generated peptide
cgccagccgggagcttcgggtgctcgcg

SEQ ID NO: 10600 - DNA, 20 bp, Artificial
  Synthetically generated peptide
gccagccgggagcttcgggt

SEQ ID NO: 10601 - DNA, 20 bp, Artificial
  Synthetically generated peptide
ccagccgggagcttcgggtg

SEQ ID NO: 10602 - DNA, 20 bp, Artificial
  Synthetically generated peptide
cagccgggagcttcgggtgc

SEQ ID NO: 10603 - DNA, 20 bp, Artificial
  Synthetically generated peptide
agccgggagcttcgggtgct

SEQ ID NO: 10604 - DNA, 20 bp, Artificial
  Synthetically generated peptide
gccgggagcttcgggtgctc

SEQ ID NO: 10605 - DNA, 20 bp, Artificial
  Synthetically generated peptide
ccgggagcttcgggtgctcg

SEQ ID NO: 10606 - DNA, 20 bp, Artificial
  Synthetically generated peptide
cgggagcttcgggtgctcgc

SEQ ID NO: 10607 - DNA, 20 bp, Artificial
  Synthetically generated peptide
gggagcttcgggtgctcgcg

SEQ ID NO: 10608 - DNA, 20 bp, Artificial
  Synthetically generated peptide
ggagcttcgggtgctcgcgc

SEQ ID NO: 10609 - DNA, 20 bp, Artificial
  Synthetically generated peptide
gagcttcgggtgctcgcgct

SEQ ID NO: 10610 - DNA, 20 bp, Artificial
  Synthetically generated peptide
agcttcgggtgctcgcgctg

SEQ ID NO: 10611 - DNA, 20 bp, Artificial
  Synthetically generated peptide
gcttcgggtgctcgcgctgc

SEQ ID NO: 10612 - DNA, 20 bp, Artificial
  Synthetically generated peptide
cttcgggtgctcgcgctgct

SEQ ID NO: 10613 - DNA, 20 bp, Artificial
  Synthetically generated peptide
ttcgggtgctcgcgctgctt

SEQ ID NO: 10614 - DNA, 20 bp, Artificial
  Synthetically generated peptide
tcgggtgctcgcgctgcttc

SEQ ID NO: 10615 - DNA, 20 bp, Artificial
  Synthetically generated peptide
cgggtgctcgcgctgcttct

SEQ ID NO: 10616 - DNA, 20 bp, Artificial
  Synthetically generated peptide
gggtgctcgcgctgcttctc

SEQ ID NO: 10617 - DNA, 20 bp, Artificial
  Synthetically generated peptide
ggtgctcgcgctgcttctcc

SEQ ID NO: 10618 - DNA, 20 bp, Artificial
  Synthetically generated peptide
gtgctcgcgctgcttctccg

SEQ ID NO: 10619 - DNA, 20 bp, Artificial
  Synthetically generated peptide
tgctcgcgctgcttctccgg

SEQ ID NO: 10620 - DNA, 20 bp, Artificial
  Synthetically generated peptide
gctcgcgctgcttctccggg

SEQ ID NO: 10621 - DNA, 20 bp, Artificial
  Synthetically generated peptide
ctcgcgctgcttctccgggt

SEQ ID NO: 10622 - DNA, 20 bp, Artificial
  Synthetically generated peptide
tcgcgctgcttctccgggta

SEQ ID NO: 10623 - DNA, 20 bp, Artificial
  Synthetically generated peptide
cgcgctgcttctccgggtac

SEQ ID NO: 10624 - DNA, 20 bp, Artificial
  Synthetically generated peptide
gcgctgcttctccgggtacg

SEQ ID NO: 10625 - DNA, 20 bp, Artificial
  Synthetically generated peptide
cgctgcttctccgggtacgg

SEQ ID NO: 10626 - DNA, 20 bp, Artificial
  Synthetically generated peptide
gctgcttctccgggtacggg

SEQ ID NO: 10627 - DNA, 20 bp, Artificial
  Synthetically generated peptide
ctgcttctccgggtacgggc

SEQ ID NO: 10628 - DNA, 20 bp, Artificial
  Synthetically generated peptide
tgcttctccgggtacgggcc

SEQ ID NO: 10629 - DNA, 20 bp, Artificial
  Synthetically generated peptide
gcttctccgggtacgggccg

SEQ ID NO: 10630 - DNA, 20 bp, Artificial
  Synthetically generated peptide
cttctccgggtacgggccgc

SEQ ID NO: 10631 - DNA, 20 bp, Artificial
  Synthetically generated peptide
ttctccgggtacgggccgct

SEQ ID NO: 10632 - DNA, 20 bp, Artificial
  Synthetically generated peptide
tctccgggtacgggccgctg

SEQ ID NO: 10633 - DNA, 20 bp, Artificial
  Synthetically generated peptide
ctccgggtacgggccgctgg

SEQ ID NO: 10634 - DNA, 20 bp, Artificial
  Synthetically generated peptide
tccgggtacgggccgctggg

SEQ ID NO: 10635 - DNA, 20 bp, Artificial
  Synthetically generated peptide
ccgggtacgggccgctgggt

SEQ ID NO: 10636 - DNA, 20 bp, Artificial
  Synthetically generated peptide
cgggtacgggccgctgggtg

SEQ ID NO: 10637 - DNA, 20 bp, Artificial
  Synthetically generated peptide
gggtacgggccgctgggtgg

SEQ ID NO: 10638 - DNA, 20 bp, Artificial
  Synthetically generated peptide
ggtacgggccgctgggtggg

SEQ ID NO: 10639 - DNA, 20 bp, Artificial
  Synthetically generated peptide
gtacgggccgctgggtgggg

SEQ ID NO: 10640 - DNA, 20 bp, Artificial
  Synthetically generated peptide
tacgggccgctgggtggggt

SEQ ID NO: 10641 - DNA, 20 bp, Artificial
  Synthetically generated peptide
acgggccgctgggtggggtc

SEQ ID NO: 10642 - DNA, 20 bp, Artificial
  Synthetically generated peptide
cgggccgctgggtggggtcc

SEQ ID NO: 10643 - DNA, 20 bp, Artificial
  Synthetically generated peptide
gggccgctgggtggggtccc

SEQ ID NO: 10644 - DNA, 20 bp, Artificial
  Synthetically generated peptide
ggccgctgggtggggtcccg

SEQ ID NO: 10645 - DNA, 20 bp, Artificial
  Synthetically generated peptide
gccgctgggtggggtcccgg

SEQ ID NO: 10646 - DNA, 20 bp, Artificial
  Synthetically generated peptide
ccgctgggtggggtcccggg

SEQ ID NO: 10647 - DNA, 20 bp, Artificial
  Synthetically generated peptide
cgctgggtggggtcccgggc

SEQ ID NO: 10648 - DNA, 20 bp, Artificial
  Synthetically generated peptide
gctgggtggggtcccgggcg

SEQ ID NO: 10649 - DNA, 20 bp, Artificial
  Synthetically generated peptide
ctgggtggggtcccgggcgt

SEQ ID NO: 10650 - DNA, 20 bp, Artificial
  Synthetically generated peptide
tgggtggggtcccgggcgtg

SEQ ID NO: 10651 - DNA, 20 bp, Artificial
  Synthetically generated peptide
gggtggggtcccgggcgtgg

SEQ ID NO: 10652 - DNA, 20 bp, Artificial
  Synthetically generated peptide
ggtggggtcccgggcgtggt

SEQ ID NO: 10653 - DNA, 20 bp, Artificial
  Synthetically generated peptide
gtggggtcccgggcgtggtg

SEQ ID NO: 10654 - DNA, 20 bp, Artificial
  Synthetically generated peptide
tggggtcccgggcgtggtgc

SEQ ID NO: 10655 - DNA, 20 bp, Artificial
  Synthetically generated peptide
ggggtcccgggcgtggtgcg

SEQ ID NO: 10656 - DNA, 20 bp, Artificial
  Synthetically generated peptide
gggtcccgggcgtggtgcgg

SEQ ID NO: 10657 - DNA, 20 bp, Artificial
  Synthetically generated peptide
ggtcccgggcgtggtgcgga

SEQ ID NO: 10658 - DNA, 20 bp, Artificial
  Synthetically generated peptide
gtcccgggcgtggtgcggag

SEQ ID NO: 10659 - DNA, 20 bp, Artificial
  Synthetically generated peptide
tcccgggcgtggtgcggagg

SEQ ID NO: 10660 - DNA, 20 bp, Artificial
  Synthetically generated peptide
cccgggcgtggtgcggaggc

SEQ ID NO: 10661 - DNA, 20 bp, Artificial
  Synthetically generated peptide
ccgggcgtggtgcggaggcg

SEQ ID NO: 10662 - DNA, 20 bp, Artificial
  Synthetically generated peptide
cgggcgtggtgcggaggcgc

SEQ ID NO: 10663 - DNA, 20 bp, Artificial
  Synthetically generated peptide
ccgccagccgggagcttcgg

SEQ ID NO: 10664 - DNA, 20 bp, Artificial
  Synthetically generated peptide
gccgccagccgggagcttcg

SEQ ID NO: 10665 - DNA, 20 bp, Artificial
  Synthetically generated peptide
tgccgccagccgggagcttc

SEQ ID NO: 10666 - DNA, 20 bp, Artificial
  Synthetically generated peptide
ctgccgccagccgggagctt

SEQ ID NO: 10667 - DNA, 20 bp, Artificial
  Synthetically generated peptide
tctgccgccagccgggagct

SEQ ID NO: 10668 - DNA, 20 bp, Artificial
  Synthetically generated peptide
ttctgccgccagccgggagc

SEQ ID NO: 10669 - DNA, 20 bp, Artificial
  Synthetically generated peptide
tttctgccgccagccgggag

SEQ ID NO: 10670 - DNA, 20 bp, Artificial
  Synthetically generated peptide
gtttctgccgccagccggga

SEQ ID NO: 10671 - DNA, 20 bp, Artificial
  Synthetically generated peptide
ggtttctgccgccagccggg

SEQ ID NO: 10672 - DNA, 20 bp, Artificial
  Synthetically generated peptide
cggtttctgccgccagccgg

SEQ ID NO: 10673 - DNA, 20 bp, Artificial
  Synthetically generated peptide
ccggtttctgccgccagccg

SEQ ID NO: 10674 - DNA, 20 bp, Artificial
  Synthetically generated peptide
cccggtttctgccgccagcc

SEQ ID NO: 10675 - DNA, 20 bp, Artificial
  Synthetically generated peptide
tcccggtttctgccgccagc

SEQ ID NO: 10676 - DNA, 20 bp, Artificial
  Synthetically generated peptide
ctcccggtttctgccgccag

SEQ ID NO: 10677 - DNA, 20 bp, Artificial
  Synthetically generated peptide
actcccggtttctgccgcca

SEQ ID NO: 10678 - DNA, 20 bp, Artificial
  Synthetically generated peptide
cactcccggtttctgccgcc

SEQ ID NO: 10679 - DNA, 20 bp, Artificial
  Synthetically generated peptide
ccactcccggtttctgccgc

SEQ ID NO: 10680 - DNA, 20 bp, Artificial
  Synthetically generated peptide
cccactcccggtttctgccg

SEQ ID NO: 10681 - DNA, 20 bp, Artificial
  Synthetically generated peptide
ccccactcccggtttctgcc

SEQ ID NO: 10682 - DNA, 20 bp, Artificial
  Synthetically generated peptide
gccccactcccggtttctgc

SEQ ID NO: 10683 - DNA, 20 bp, Artificial
  Synthetically generated peptide
ggccccactcccggtttctg

SEQ ID NO: 10684 - DNA, 20 bp, Artificial
  Synthetically generated peptide
cggccccactcccggtttct

SEQ ID NO: 10685 - DNA, 20 bp, Artificial
  Synthetically generated peptide
ccggccccactcccggtttc

SEQ ID NO: 10686 - DNA, 20 bp, Artificial
  Synthetically generated peptide
cccggccccactcccggttt

SEQ ID NO: 10687 - DNA, 20 bp, Artificial
  Synthetically generated peptide
gcccggccccactcccggtt

SEQ ID NO: 10688 - DNA, 20 bp, Artificial
  Synthetically generated peptide
cgcccggccccactcccggt

SEQ ID NO: 10689 - DNA, 20 bp, Artificial
  Synthetically generated peptide
tcgcccggccccactcccgg

SEQ ID NO: 10690 - DNA, 20 bp, Artificial
  Synthetically generated peptide
ctcgcccggccccactcccg

SEQ ID NO: 10691 - DNA, 20 bp, Artificial
  Synthetically generated peptide
actcgcccggccccactccc

SEQ ID NO: 10692 - DNA, 20 bp, Artificial
  Synthetically generated peptide
cactcgcccggccccactcc

SEQ ID NO: 10693 - DNA, 20 bp, Artificial
  Synthetically generated peptide
gcactcgcccggccccactc

SEQ ID NO: 10694 - DNA, 20 bp, Artificial
  Synthetically generated peptide
cgcactcgcccggccccact

SEQ ID NO: 10695 - DNA, 20 bp, Artificial
  Synthetically generated peptide
gcgcactcgcccggccccac

SEQ ID NO: 10696 - DNA, 20 bp, Artificial
  Synthetically generated peptide
cgcgcactcgcccggcccca

SEQ ID NO: 10697 - DNA, 20 bp, Artificial
  Synthetically generated peptide
ccgcgcactcgcccggcccc

SEQ ID NO: 10698 - DNA, 20 bp, Artificial
  Synthetically generated peptide
gccgcgcactcgcccggccc

SEQ ID NO: 10699 - DNA, 20 bp, Artificial
  Synthetically generated peptide
tgccgcgcactcgcccggcc

SEQ ID NO: 10700 - DNA, 20 bp, Artificial
  Synthetically generated peptide
atgccgcgcactcgcccggc

SEQ ID NO: 10701 - DNA, 20 bp, Artificial
  Synthetically generated peptide
gatgccgcgcactcgcccgg

SEQ ID NO: 10702 - DNA, 20 bp, Artificial
  Synthetically generated peptide
ggatgccgcgcactcgcccg

SEQ ID NO: 10703 - DNA, 20 bp, Artificial
  Synthetically generated peptide
gggatgccgcgcactcgccc

SEQ ID NO: 10704 - DNA, 20 bp, Artificial
  Synthetically generated peptide
tgggatgccgcgcactcgcc

SEQ ID NO: 10705 - DNA, 20 bp, Artificial
  Synthetically generated peptide
ctgggatgccgcgcactcgc

SEQ ID NO: 10706 - DNA, 20 bp, Artificial
  Synthetically generated peptide
cctgggatgccgcgcactcg

SEQ ID NO: 10707 - DNA, 20 bp, Artificial
  Synthetically generated peptide
gcctgggatgccgcgcactc

SEQ ID NO: 10708 - DNA, 20 bp, Artificial
  Synthetically generated peptide
ggcctgggatgccgcgcact

SEQ ID NO: 10709 - DNA, 20 bp, Artificial
  Synthetically generated peptide
cggcctgggatgccgcgcac

SEQ ID NO: 10710 - DNA, 20 bp, Artificial
  Synthetically generated peptide
ccggcctgggatgccgcgca

SEQ ID NO: 10711 - DNA, 20 bp, Artificial
  Synthetically generated peptide
gccggcctgggatgccgcgc

SEQ ID NO: 10712 - DNA, 20 bp, Artificial
  Synthetically generated peptide
ggccggcctgggatgccgcg

SEQ ID NO: 10713 - DNA, 20 bp, Artificial
  Synthetically generated peptide
gggccggcctgggatgccgc

SEQ ID NO: 10714 - DNA, 20 bp, Artificial
  Synthetically generated peptide
cgggccggcctgggatgccg

SEQ ID NO: 10715 - DNA, 20 bp, Artificial
  Synthetically generated peptide
tcgggccggcctgggatgcc

SEQ ID NO: 10716 - DNA, 20 bp, Artificial
  Synthetically generated peptide
ttcgggccggcctgggatgc

SEQ ID NO: 10717 - DNA, 20 bp, Artificial
  Synthetically generated peptide
gttcgggccggcctgggatg

SEQ ID NO: 10718 - DNA, 20 bp, Artificial
  Synthetically generated peptide
cgttcgggccggcctgggat

SEQ ID NO: 10719 - DNA, 20 bp, Artificial
  Synthetically generated peptide
gcgttcgggccggcctggga

SEQ ID NO: 10720 - DNA, 20 bp, Artificial
  Synthetically generated peptide
agcgttcgggccggcctggg

SEQ ID NO: 10721 - DNA, 20 bp, Artificial
  Synthetically generated peptide
gagcgttcgggccggcctgg

SEQ ID NO: 10722 - DNA, 20 bp, Artificial
  Synthetically generated peptide
ggagcgttcgggccggcctg

SEQ ID NO: 10723 - DNA, 20 bp, Artificial
  Synthetically generated peptide
cggagcgttcgggccggcct

SEQ ID NO: 10724 - DNA, 20 bp, Artificial
  Synthetically generated peptide
gcggagcgttcgggccggcc

SEQ ID NO: 10725 - DNA, 20 bp, Artificial
  Synthetically generated peptide
ggcggagcgttcgggccggc

SEQ ID NO: 10726 - DNA, 20 bp, Artificial
  Synthetically generated peptide
gggcggagcgttcgggccgg

SEQ ID NO: 10727 - DNA, 20 bp, Artificial
  Synthetically generated peptide
cgggcggagcgttcgggccg

SEQ ID NO: 10728 - DNA, 20 bp, Artificial
  Synthetically generated peptide
gcgggcggagcgttcgggcc

SEQ ID NO: 10729 - DNA, 20 bp, Artificial
  Synthetically generated peptide
cgcgggcggagcgttcgggc

SEQ ID NO: 10730 - DNA, 20 bp, Artificial
  Synthetically generated peptide
ccgcgggcggagcgttcggg

SEQ ID NO: 10731 - DNA, 20 bp, Artificial
  Synthetically generated peptide
accgcgggcggagcgttcgg

SEQ ID NO: 10732 - DNA, 20 bp, Artificial
  Synthetically generated peptide
caccgcgggcggagcgttcg

SEQ ID NO: 10733 - DNA, 20 bp, Artificial
  Synthetically generated peptide
ccaccgcgggcggagcgttc

SEQ ID NO: 10734 - DNA, 20 bp, Artificial
  Synthetically generated peptide
cccaccgcgggcggagcgtt

SEQ ID NO: 10735 - DNA, 20 bp, Artificial
  Synthetically generated peptide
gcccaccgcgggcggagcgt

SEQ ID NO: 10736 - DNA, 20 bp, Artificial
  Synthetically generated peptide
ggcccaccgcgggcggagcg

SEQ ID NO: 10737 - DNA, 20 bp, Artificial
  Synthetically generated peptide
cggcccaccgcgggcggagc

SEQ ID NO: 10738 - DNA, 20 bp, Artificial
  Synthetically generated peptide
tcggcccaccgcgggcggag

SEQ ID NO: 10739 - DNA, 20 bp, Artificial
  Synthetically generated peptide
gtcggcccaccgcgggcgga

SEQ ID NO: 10740 - DNA, 20 bp, Artificial
  Synthetically generated peptide
agtcggcccaccgcgggcgg

SEQ ID NO: 10741 - DNA, 20 bp, Artificial
  Synthetically generated peptide
aagtcggcccaccgcgggcg

SEQ ID NO: 10742 - DNA, 20 bp, Artificial
  Synthetically generated peptide
gaagtcggcccaccgcgggc

SEQ ID NO: 10743 - DNA, 20 bp, Artificial
  Synthetically generated peptide
ggaagtcggcccaccgcggg

SEQ ID NO: 10744 - DNA, 20 bp, Artificial
  Synthetically generated peptide
gggaagtcggcccaccgcgg

SEQ ID NO: 10745 - DNA, 20 bp, Artificial
  Synthetically generated peptide
ggggaagtcggcccaccgcg

SEQ ID NO: 10746 - DNA, 20 bp, Artificial
  Synthetically generated peptide
aggggaagtcggcccaccgc

SEQ ID NO: 10747 - DNA, 20 bp, Artificial
  Synthetically generated peptide
gaggggaagtcggcccaccg

SEQ ID NO: 10748 - DNA, 20 bp, Artificial
  Synthetically generated peptide
ggaggggaagtcggcccacc

SEQ ID NO: 10749 - DNA, 28 bp, Artificial
  Synthetically generated peptide
cgggtacgggccgctgggtggggtcccg

SEQ ID NO: 10750 - DNA, 20 bp, Artificial
  Synthetically generated peptide
gggtacgggccgctgggtgg

SEQ ID NO: 10751 - DNA, 20 bp, Artificial
  Synthetically generated peptide
ggtacgggccgctgggtggg

SEQ ID NO: 10752 - DNA, 20 bp, Artificial
  Synthetically generated peptide
gtacgggccgctgggtgggg

SEQ ID NO: 10753 - DNA, 20 bp, Artificial
  Synthetically generated peptide
tacgggccgctgggtggggt

SEQ ID NO: 10754 - DNA, 20 bp, Artificial
  Synthetically generated peptide
acgggccgctgggtggggtc

SEQ ID NO: 10755 - DNA, 20 bp, Artificial
  Synthetically generated peptide
cgggccgctgggtggggtcc

SEQ ID NO: 10756 - DNA, 20 bp, Artificial
  Synthetically generated peptide
gggccgctgggtggggtccc

SEQ ID NO: 10757 - DNA, 20 bp, Artificial
  Synthetically generated peptide
ggccgctgggtggggtcccg

SEQ ID NO: 10758 - DNA, 20 bp, Artificial
  Synthetically generated peptide
gccgctgggtggggtcccgg

SEQ ID NO: 10759 - DNA, 20 bp, Artificial
  Synthetically generated peptide
ccgctgggtggggtcccggg

SEQ ID NO: 10760 - DNA, 20 bp, Artificial
  Synthetically generated peptide
cgctgggtggggtcccgggc

SEQ ID NO: 10761 - DNA, 20 bp, Artificial
  Synthetically generated peptide
gctgggtggggtcccgggcg

SEQ ID NO: 10762 - DNA, 20 bp, Artificial
  Synthetically generated peptide
ctgggtggggtcccgggcgt

SEQ ID NO: 10763 - DNA, 20 bp, Artificial
  Synthetically generated peptide
tgggtggggtcccgggcgtg

SEQ ID NO: 10764 - DNA, 20 bp, Artificial
  Synthetically generated peptide
gggtggggtcccgggcgtgg

SEQ ID NO: 10765 - DNA, 20 bp, Artificial
  Synthetically generated peptide
ggtggggtcccgggcgtggt

SEQ ID NO: 10766 - DNA, 20 bp, Artificial
  Synthetically generated peptide
gtggggtcccgggcgtggtg

SEQ ID NO: 10767 - DNA, 20 bp, Artificial
  Synthetically generated peptide
tggggtcccgggcgtggtgc

SEQ ID NO: 10768 - DNA, 20 bp, Artificial
  Synthetically generated peptide
ggggtcccgggcgtggtgcg

SEQ ID NO: 10769 - DNA, 20 bp, Artificial
  Synthetically generated peptide
gggtcccgggcgtggtgcgg

SEQ ID NO: 10770 - DNA, 20 bp, Artificial
  Synthetically generated peptide
ggtcccgggcgtggtgcgga

SEQ ID NO: 10771 - DNA, 20 bp, Artificial
  Synthetically generated peptide
gtcccgggcgtggtgcggag

SEQ ID NO: 10772 - DNA, 20 bp, Artificial
  Synthetically generated peptide
tcccgggcgtggtgcggagg

SEQ ID NO: 10773 - DNA, 20 bp, Artificial
  Synthetically generated peptide
cccgggcgtggtgcggaggc

SEQ ID NO: 10774 - DNA, 20 bp, Artificial
  Synthetically generated peptide
ccgggcgtggtgcggaggcg

SEQ ID NO: 10775 - DNA, 20 bp, Artificial
  Synthetically generated peptide
cgggcgtggtgcggaggcgc

SEQ ID NO: 10776 - DNA, 20 bp, Artificial
  Synthetically generated peptide
ccgggtacgggccgctgggt

SEQ ID NO: 10777 - DNA, 20 bp, Artificial
  Synthetically generated peptide
tccgggtacgggccgctggg

SEQ ID NO: 10778 - DNA, 20 bp, Artificial
  Synthetically generated peptide
ctccgggtacgggccgctgg

SEQ ID NO: 10779 - DNA, 20 bp, Artificial
  Synthetically generated peptide
tctccgggtacgggccgctg

SEQ ID NO: 10780 - DNA, 20 bp, Artificial
  Synthetically generated peptide
ttctccgggtacgggccgct

SEQ ID NO: 10781 - DNA, 20 bp, Artificial
  Synthetically generated peptide
cttctccgggtacgggccgc

SEQ ID NO: 10782 - DNA, 20 bp, Artificial
  Synthetically generated peptide
gcttctccgggtacgggccg

SEQ ID NO: 10783 - DNA, 20 bp, Artificial
  Synthetically generated peptide
tgcttctccgggtacgggcc

SEQ ID NO: 10784 - DNA, 20 bp, Artificial
  Synthetically generated peptide
ctgcttctccgggtacgggc

SEQ ID NO: 10785 - DNA, 20 bp, Artificial
  Synthetically generated peptide
gctgcttctccgggtacggg

SEQ ID NO: 10786 - DNA, 20 bp, Artificial
  Synthetically generated peptide
cgctgcttctccgggtacgg

SEQ ID NO: 10787 - DNA, 20 bp, Artificial
  Synthetically generated peptide
gcgctgcttctccgggtacg

SEQ ID NO: 10788 - DNA, 20 bp, Artificial
  Synthetically generated peptide
cgcgctgcttctccgggtac

SEQ ID NO: 10789 - DNA, 20 bp, Artificial
  Synthetically generated peptide
tcgcgctgcttctccgggta

SEQ ID NO: 10790 - DNA, 20 bp, Artificial
  Synthetically generated peptide
ctcgcgctgcttctccgggt

SEQ ID NO: 10791 - DNA, 20 bp, Artificial
  Synthetically generated peptide
gctcgcgctgcttctccggg

SEQ ID NO: 10792 - DNA, 20 bp, Artificial
  Synthetically generated peptide
tgctcgcgctgcttctccgg

SEQ ID NO: 10793 - DNA, 20 bp, Artificial
  Synthetically generated peptide
gtgctcgcgctgcttctccg

SEQ ID NO: 10794 - DNA, 20 bp, Artificial
  Synthetically generated peptide
ggtgctcgcgctgcttctcc

SEQ ID NO: 10795 - DNA, 20 bp, Artificial
  Synthetically generated peptide
gggtgctcgcgctgcttctc

SEQ ID NO: 10796 - DNA, 20 bp, Artificial
  Synthetically generated peptide
cgggtgctcgcgctgcttct

SEQ ID NO: 10797 - DNA, 20 bp, Artificial
  Synthetically generated peptide
tcgggtgctcgcgctgcttc

SEQ ID NO: 10798 - DNA, 20 bp, Artificial
  Synthetically generated peptide
ttcgggtgctcgcgctgctt

SEQ ID NO: 10799 - DNA, 20 bp, Artificial
  Synthetically generated peptide
cttcgggtgctcgcgctgct

SEQ ID NO: 10800 - DNA, 20 bp, Artificial
  Synthetically generated peptide
gcttcgggtgctcgcgctgc

SEQ ID NO: 10801 - DNA, 20 bp, Artificial
  Synthetically generated peptide
agcttcgggtgctcgcgctg

SEQ ID NO: 10802 - DNA, 20 bp, Artificial
  Synthetically generated peptide
gagcttcgggtgctcgcgct

SEQ ID NO: 10803 - DNA, 20 bp, Artificial
  Synthetically generated peptide
ggagcttcgggtgctcgcgc

SEQ ID NO: 10804 - DNA, 20 bp, Artificial
  Synthetically generated peptide
gggagcttcgggtgctcgcg

SEQ ID NO: 10805 - DNA, 20 bp, Artificial
  Synthetically generated peptide
cgggagcttcgggtgctcgc

SEQ ID NO: 10806 - DNA, 20 bp, Artificial
  Synthetically generated peptide
ccgggagcttcgggtgctcg

SEQ ID NO: 10807 - DNA, 20 bp, Artificial
  Synthetically generated peptide
gccgggagcttcgggtgctc

SEQ ID NO: 10808 - DNA, 20 bp, Artificial
  Synthetically generated peptide
agccgggagcttcgggtgct

SEQ ID NO: 10809 - DNA, 20 bp, Artificial
  Synthetically generated peptide
cagccgggagcttcgggtgc

SEQ ID NO: 10810 - DNA, 20 bp, Artificial
  Synthetically generated peptide
ccagccgggagcttcgggtg

SEQ ID NO: 10811 - DNA, 20 bp, Artificial
  Synthetically generated peptide
gccagccgggagcttcgggt

SEQ ID NO: 10812 - DNA, 20 bp, Artificial
  Synthetically generated peptide
cgccagccgggagcttcggg

SEQ ID NO: 10813 - DNA, 20 bp, Artificial
  Synthetically generated peptide
ccgccagccgggagcttcgg

SEQ ID NO: 10814 - DNA, 20 bp, Artificial
  Synthetically generated peptide
gccgccagccgggagcttcg

SEQ ID NO: 10815 - DNA, 20 bp, Artificial
  Synthetically generated peptide
tgccgccagccgggagcttc

SEQ ID NO: 10816 - DNA, 20 bp, Artificial
  Synthetically generated peptide
ctgccgccagccgggagctt

SEQ ID NO: 10817 - DNA, 20 bp, Artificial
  Synthetically generated peptide
tctgccgccagccgggagct

SEQ ID NO: 10818 - DNA, 20 bp, Artificial
  Synthetically generated peptide
ttctgccgccagccgggagc

SEQ ID NO: 10819 - DNA, 20 bp, Artificial
  Synthetically generated peptide
tttctgccgccagccgggag

SEQ ID NO: 10820 - DNA, 20 bp, Artificial
  Synthetically generated peptide
gtttctgccgccagccggga

SEQ ID NO: 10821 - DNA, 20 bp, Artificial
  Synthetically generated peptide
ggtttctgccgccagccggg

SEQ ID NO: 10822 - DNA, 20 bp, Artificial
  Synthetically generated peptide
cggtttctgccgccagccgg

SEQ ID NO: 10823 - DNA, 20 bp, Artificial
  Synthetically generated peptide
ccggtttctgccgccagccg

SEQ ID NO: 10824 - DNA, 20 bp, Artificial
  Synthetically generated peptide
cccggtttctgccgccagcc

SEQ ID NO: 10825 - DNA, 20 bp, Artificial
  Synthetically generated peptide
tcccggtttctgccgccagc

SEQ ID NO: 10826 - DNA, 20 bp, Artificial
  Synthetically generated peptide
ctcccggtttctgccgccag

SEQ ID NO: 10827 - DNA, 20 bp, Artificial
  Synthetically generated peptide
actcccggtttctgccgcca

SEQ ID NO: 10828 - DNA, 20 bp, Artificial
  Synthetically generated peptide
cactcccggtttctgccgcc

SEQ ID NO: 10829 - DNA, 20 bp, Artificial
  Synthetically generated peptide
ccactcccggtttctgccgc

SEQ ID NO: 10830 - DNA, 20 bp, Artificial
  Synthetically generated peptide
cccactcccggtttctgccg

SEQ ID NO: 10831 - DNA, 20 bp, Artificial
  Synthetically generated peptide
ccccactcccggtttctgcc

SEQ ID NO: 10832 - DNA, 20 bp, Artificial
  Synthetically generated peptide
gccccactcccggtttctgc

SEQ ID NO: 10833 - DNA, 20 bp, Artificial
  Synthetically generated peptide
ggccccactcccggtttctg

SEQ ID NO: 10834 - DNA, 20 bp, Artificial
  Synthetically generated peptide
cggccccactcccggtttct

SEQ ID NO: 10835 - DNA, 20 bp, Artificial
  Synthetically generated peptide
ccggccccactcccggtttc

SEQ ID NO: 10836 - DNA, 20 bp, Artificial
  Synthetically generated peptide
cccggccccactcccggttt

SEQ ID NO: 10837 - DNA, 20 bp, Artificial
  Synthetically generated peptide
gcccggccccactcccggtt

SEQ ID NO: 10838 - DNA, 20 bp, Artificial
  Synthetically generated peptide
cgcccggccccactcccggt

SEQ ID NO: 10839 - DNA, 20 bp, Artificial
  Synthetically generated peptide
tcgcccggccccactcccgg

SEQ ID NO: 10840 - DNA, 20 bp, Artificial
  Synthetically generated peptide
ctcgcccggccccactcccg

SEQ ID NO: 10841 - DNA, 20 bp, Artificial
  Synthetically generated peptide
actcgcccggccccactccc

SEQ ID NO: 10842 - DNA, 20 bp, Artificial
  Synthetically generated peptide
cactcgcccggccccactcc

SEQ ID NO: 10843 - DNA, 20 bp, Artificial
  Synthetically generated peptide
gcactcgcccggccccactc

SEQ ID NO: 10844 - DNA, 20 bp, Artificial
  Synthetically generated peptide
cgcactcgcccggccccact

SEQ ID NO: 10845 - DNA, 20 bp, Artificial
  Synthetically generated peptide
gcgcactcgcccggccccac

SEQ ID NO: 10846 - DNA, 20 bp, Artificial
  Synthetically generated peptide
cgcgcactcgcccggcccca

SEQ ID NO: 10847 - DNA, 20 bp, Artificial
  Synthetically generated peptide
ccgcgcactcgcccggcccc

SEQ ID NO: 10848 - DNA, 20 bp, Artificial
  Synthetically generated peptide
gccgcgcactcgcccggccc

SEQ ID NO: 10849 - DNA, 20 bp, Artificial
  Synthetically generated peptide
tgccgcgcactcgcccggcc

SEQ ID NO: 10850 - DNA, 20 bp, Artificial
  Synthetically generated peptide
atgccgcgcactcgcccggc

SEQ ID NO: 10851 - DNA, 20 bp, Artificial
  Synthetically generated peptide
gatgccgcgcactcgcccgg

SEQ ID NO: 10852 - DNA, 20 bp, Artificial
  Synthetically generated peptide
ggatgccgcgcactcgcccg

SEQ ID NO: 10853 - DNA, 20 bp, Artificial
  Synthetically generated peptide
gggatgccgcgcactcgccc

SEQ ID NO: 10854 - DNA, 20 bp, Artificial
  Synthetically generated peptide
tgggatgccgcgcactcgcc

SEQ ID NO: 10855 - DNA, 20 bp, Artificial
  Synthetically generated peptide
ctgggatgccgcgcactcgc

SEQ ID NO: 10856 - DNA, 20 bp, Artificial
  Synthetically generated peptide
cctgggatgccgcgcactcg

SEQ ID NO: 10857 - DNA, 20 bp, Artificial
  Synthetically generated peptide
gcctgggatgccgcgcactc

SEQ ID NO: 10858 - DNA, 20 bp, Artificial
  Synthetically generated peptide
ggcctgggatgccgcgcact

SEQ ID NO: 10859 - DNA, 20 bp, Artificial
  Synthetically generated peptide
cggcctgggatgccgcgcac

SEQ ID NO: 10860 - DNA, 20 bp, Artificial
  Synthetically generated peptide
ccggcctgggatgccgcgca

SEQ ID NO: 10861 - DNA, 20 bp, Artificial
  Synthetically generated peptide
gccggcctgggatgccgcgc

SEQ ID NO: 10862 - DNA, 20 bp, Artificial
  Synthetically generated peptide
ggccggcctgggatgccgcg

SEQ ID NO: 10863 - DNA, 20 bp, Artificial
  Synthetically generated peptide
gggccggcctgggatgccgc

SEQ ID NO: 10864 - DNA, 20 bp, Artificial
  Synthetically generated peptide
cgggccggcctgggatgccg

SEQ ID NO: 10865 - DNA, 20 bp, Artificial
  Synthetically generated peptide
tcgggccggcctgggatgcc

SEQ ID NO: 10866 - DNA, 20 bp, Artificial
  Synthetically generated peptide
ttcgggccggcctgggatgc

SEQ ID NO: 10867 - DNA, 20 bp, Artificial
  Synthetically generated peptide
gttcgggccggcctgggatg

SEQ ID NO: 10868 - DNA, 20 bp, Artificial
  Synthetically generated peptide
cgttcgggccggcctgggat

SEQ ID NO: 10869 - DNA, 20 bp, Artificial
  Synthetically generated peptide
gcgttcgggccggcctggga

SEQ ID NO: 10870 - DNA, 20 bp, Artificial
  Synthetically generated peptide
agcgttcgggccggcctggg

SEQ ID NO: 10871 - DNA, 20 bp, Artificial
  Synthetically generated peptide
gagcgttcgggccggcctgg

SEQ ID NO: 10872 - DNA, 20 bp, Artificial
  Synthetically generated peptide
ggagcgttcgggccggcctg

SEQ ID NO: 10873 - DNA, 20 bp, Artificial
  Synthetically generated peptide
cggagcgttcgggccggcct

SEQ ID NO: 10874 - DNA, 20 bp, Artificial
  Synthetically generated peptide
gcggagcgttcgggccggcc

SEQ ID NO: 10875 - DNA, 20 bp, Artificial
  Synthetically generated peptide
ggcggagcgttcgggccggc

SEQ ID NO: 10876 - DNA, 20 bp, Artificial
  Synthetically generated peptide
gggcggagcgttcgggccgg

SEQ ID NO: 10877 - DNA, 20 bp, Artificial
  Synthetically generated peptide
cgggcggagcgttcgggccg

SEQ ID NO: 10878 - DNA, 20 bp, Artificial
  Synthetically generated peptide
gcgggcggagcgttcgggcc

SEQ ID NO: 10879 - DNA, 20 bp, Artificial
  Synthetically generated peptide
cgcgggcggagcgttcgggc

SEQ ID NO: 10880 - DNA, 20 bp, Artificial
  Synthetically generated peptide
ccgcgggcggagcgttcggg

SEQ ID NO: 10881 - DNA, 20 bp, Artificial
  Synthetically generated peptide
accgcgggcggagcgttcgg

SEQ ID NO: 10882 - DNA, 20 bp, Artificial
  Synthetically generated peptide
caccgcgggcggagcgttcg

SEQ ID NO: 10883 - DNA, 20 bp, Artificial
  Synthetically generated peptide
ccaccgcgggcggagcgttc

SEQ ID NO: 10884 - DNA, 20 bp, Artificial
  Synthetically generated peptide
cccaccgcgggcggagcgtt

SEQ ID NO: 10885 - DNA, 20 bp, Artificial
  Synthetically generated peptide
gcccaccgcgggcggagcgt

SEQ ID NO: 10886 - DNA, 20 bp, Artificial
  Synthetically generated peptide
ggcccaccgcgggcggagcg

SEQ ID NO: 10887 - DNA, 20 bp, Artificial
  Synthetically generated peptide
cggcccaccgcgggcggagc

SEQ ID NO: 10888 - DNA, 20 bp, Artificial
  Synthetically generated peptide
tcggcccaccgcgggcggag

SEQ ID NO: 10889 - DNA, 20 bp, Artificial
  Synthetically generated peptide
gtcggcccaccgcgggcgga

SEQ ID NO: 10890 - DNA, 20 bp, Artificial
  Synthetically generated peptide
agtcggcccaccgcgggcgg

SEQ ID NO: 10891 - DNA, 20 bp, Artificial
  Synthetically generated peptide
aagtcggcccaccgcgggcg

SEQ ID NO: 10892 - DNA, 20 bp, Artificial
  Synthetically generated peptide
gaagtcggcccaccgcgggc

SEQ ID NO: 10893 - DNA, 20 bp, Artificial
  Synthetically generated peptide
ggaagtcggcccaccgcggg

SEQ ID NO: 10894 - DNA, 20 bp, Artificial
  Synthetically generated peptide
gggaagtcggcccaccgcgg

SEQ ID NO: 10895 - DNA, 20 bp, Artificial
  Synthetically generated peptide
ggggaagtcggcccaccgcg

SEQ ID NO: 10896 - DNA, 20 bp, Artificial
  Synthetically generated peptide
aggggaagtcggcccaccgc

SEQ ID NO: 10897 - DNA, 20 bp, Artificial
  Synthetically generated peptide
gaggggaagtcggcccaccg

SEQ ID NO: 10898 - DNA, 20 bp, Artificial
  Synthetically generated peptide
ggaggggaagtcggcccacc

SEQ ID NO: 10899 - DNA, 26 bp, Artificial
  Synthetically generated peptide
gtgcggaggcgcagggccgggctccg

SEQ ID NO: 10900 - DNA, 23 bp, Artificial
  Synthetically generated peptide
ctacgcgcggctgcagggggcgc

SEQ ID NO: 10901 - DNA, 20 bp, Artificial
  Synthetically generated peptide
tacgcgcggctgcagggggc

SEQ ID NO: 10902 - DNA, 20 bp, Artificial
  Synthetically generated peptide
acgcgcggctgcagggggcg

SEQ ID NO: 10903 - DNA, 20 bp, Artificial
  Synthetically generated peptide
cgcgcggctgcagggggcgc

SEQ ID NO: 10904 - DNA, 20 bp, Artificial
  Synthetically generated peptide
gcgcggctgcagggggcgct

SEQ ID NO: 10905 - DNA, 20 bp, Artificial
  Synthetically generated peptide
cgcggctgcagggggcgctg

SEQ ID NO: 10906 - DNA, 20 bp, Artificial
  Synthetically generated peptide
gcggctgcagggggcgctgg

SEQ ID NO: 10907 - DNA, 20 bp, Artificial
  Synthetically generated peptide
cggctgcagggggcgctggg

SEQ ID NO: 10908 - DNA, 20 bp, Artificial
  Synthetically generated peptide
cctacgcgcggctgcagggg

SEQ ID NO: 10909 - DNA, 20 bp, Artificial
  Synthetically generated peptide
gcctacgcgcggctgcaggg

SEQ ID NO: 10910 - DNA, 20 bp, Artificial
  Synthetically generated peptide
tgcctacgcgcggctgcagg

SEQ ID NO: 10911 - DNA, 20 bp, Artificial
  Synthetically generated peptide
ctgcctacgcgcggctgcag

SEQ ID NO: 10912 - DNA, 20 bp, Artificial
  Synthetically generated peptide
tctgcctacgcgcggctgca

SEQ ID NO: 10913 - DNA, 20 bp, Artificial
  Synthetically generated peptide
ctctgcctacgcgcggctgc

SEQ ID NO: 10914 - DNA, 20 bp, Artificial
  Synthetically generated peptide
tctctgcctacgcgcggctg

SEQ ID NO: 10915 - DNA, 20 bp, Artificial
  Synthetically generated peptide
gtctctgcctacgcgcggct

SEQ ID NO: 10916 - DNA, 20 bp, Artificial
  Synthetically generated peptide
cgtctctgcctacgcgcggc

SEQ ID NO: 10917 - DNA, 20 bp, Artificial
  Synthetically generated peptide
ccgtctctgcctacgcgcgg

SEQ ID NO: 10918 - DNA, 20 bp, Artificial
  Synthetically generated peptide
tccgtctctgcctacgcgcg

SEQ ID NO: 10919 - DNA, 20 bp, Artificial
  Synthetically generated peptide
ctccgtctctgcctacgcgc

SEQ ID NO: 10920 - DNA, 20 bp, Artificial
  Synthetically generated peptide
gctccgtctctgcctacgcg

SEQ ID NO: 10921 - DNA, 20 bp, Artificial
  Synthetically generated peptide
ggctccgtctctgcctacgc

SEQ ID NO: 10922 - DNA, 20 bp, Artificial
  Synthetically generated peptide
gggctccgtctctgcctacg

SEQ ID NO: 10923 - DNA, 20 bp, Artificial
  Synthetically generated peptide
cgggctccgtctctgcctac

SEQ ID NO: 10924 - DNA, 20 bp, Artificial
  Synthetically generated peptide
ccgggctccgtctctgccta

SEQ ID NO: 10925 - DNA, 20 bp, Artificial
  Synthetically generated peptide
gccgggctccgtctctgcct

SEQ ID NO: 10926 - DNA, 20 bp, Artificial
  Synthetically generated peptide
ggccgggctccgtctctgcc

SEQ ID NO: 10927 - DNA, 20 bp, Artificial
  Synthetically generated peptide
gggccgggctccgtctctgc

SEQ ID NO: 10928 - DNA, 20 bp, Artificial
  Synthetically generated peptide
agggccgggctccgtctctg

SEQ ID NO: 10929 - DNA, 20 bp, Artificial
  Synthetically generated peptide
cagggccgggctccgtctct

SEQ ID NO: 10930 - DNA, 20 bp, Artificial
  Synthetically generated peptide
gcagggccgggctccgtctc

SEQ ID NO: 10931 - DNA, 20 bp, Artificial
  Synthetically generated peptide
cgcagggccgggctccgtct

SEQ ID NO: 10932 - DNA, 20 bp, Artificial
  Synthetically generated peptide
gcgcagggccgggctccgtc

SEQ ID NO: 10933 - DNA, 20 bp, Artificial
  Synthetically generated peptide
ggcgcagggccgggctccgt

SEQ ID NO: 10934 - DNA, 20 bp, Artificial
  Synthetically generated peptide
aggcgcagggccgggctccg

SEQ ID NO: 10935 - DNA, 20 bp, Artificial
  Synthetically generated peptide
gaggcgcagggccgggctcc

SEQ ID NO: 10936 - DNA, 20 bp, Artificial
  Synthetically generated peptide
ggaggcgcagggccgggctc

SEQ ID NO: 10937 - DNA, 20 bp, Artificial
  Synthetically generated peptide
cggaggcgcagggccgggct

SEQ ID NO: 10938 - DNA, 26 bp, Artificial
  Synthetically generated peptide
ctgcgcaggactcgcgtcctggcccg

SEQ ID NO: 10939 - DNA, 20 bp, Artificial
  Synthetically generated peptide
tgcgcaggactcgcgtcctg

SEQ ID NO: 10940 - DNA, 20 bp, Artificial
  Synthetically generated peptide
gcgcaggactcgcgtcctgg

SEQ ID NO: 10941 - DNA, 20 bp, Artificial
  Synthetically generated peptide
cgcaggactcgcgtcctggc

SEQ ID NO: 10942 - DNA, 20 bp, Artificial
  Synthetically generated peptide
gcaggactcgcgtcctggcc

SEQ ID NO: 10943 - DNA, 20 bp, Artificial
  Synthetically generated peptide
caggactcgcgtcctggccc

SEQ ID NO: 10944 - DNA, 20 bp, Artificial
  Synthetically generated peptide
aggactcgcgtcctggcccg

SEQ ID NO: 10945 - DNA, 20 bp, Artificial
  Synthetically generated peptide
ggactcgcgtcctggcccgg

SEQ ID NO: 10946 - DNA, 20 bp, Artificial
  Synthetically generated peptide
gactcgcgtcctggcccggg

SEQ ID NO: 10947 - DNA, 20 bp, Artificial
  Synthetically generated peptide
actcgcgtcctggcccgggc

SEQ ID NO: 10948 - DNA, 20 bp, Artificial
  Synthetically generated peptide
ctcgcgtcctggcccgggcc

SEQ ID NO: 10949 - DNA, 20 bp, Artificial
  Synthetically generated peptide
tcgcgtcctggcccgggcct

SEQ ID NO: 10950 - DNA, 20 bp, Artificial
  Synthetically generated peptide
cgcgtcctggcccgggcctc

SEQ ID NO: 10951 - DNA, 20 bp, Artificial
  Synthetically generated peptide
gcgtcctggcccgggcctcc

SEQ ID NO: 10952 - DNA, 20 bp, Artificial
  Synthetically generated peptide
cgtcctggcccgggcctccc

SEQ ID NO: 10953 - DNA, 20 bp, Artificial
  Synthetically generated peptide
gtcctggcccgggcctccca

SEQ ID NO: 10954 - DNA, 20 bp, Artificial
  Synthetically generated peptide
tcctggcccgggcctcccag

SEQ ID NO: 10955 - DNA, 20 bp, Artificial
  Synthetically generated peptide
cctggcccgggcctcccagc

SEQ ID NO: 10956 - DNA, 20 bp, Artificial
  Synthetically generated peptide
ctggcccgggcctcccagcc

SEQ ID NO: 10957 - DNA, 20 bp, Artificial
  Synthetically generated peptide
tggcccgggcctcccagccc

SEQ ID NO: 10958 - DNA, 20 bp, Artificial
  Synthetically generated peptide
ggcccgggcctcccagcccg

SEQ ID NO: 10959 - DNA, 20 bp, Artificial
  Synthetically generated peptide
gcccgggcctcccagcccgc

SEQ ID NO: 10960 - DNA, 20 bp, Artificial
  Synthetically generated peptide
cccgggcctcccagcccgca

SEQ ID NO: 10961 - DNA, 20 bp, Artificial
  Synthetically generated peptide
ccgggcctcccagcccgcag

SEQ ID NO: 10962 - DNA, 20 bp, Artificial
  Synthetically generated peptide
cgggcctcccagcccgcaga

SEQ ID NO: 10963 - DNA, 20 bp, Artificial
  Synthetically generated peptide
gggcctcccagcccgcagag

SEQ ID NO: 10964 - DNA, 20 bp, Artificial
  Synthetically generated peptide
ggcctcccagcccgcagagc

SEQ ID NO: 10965 - DNA, 20 bp, Artificial
  Synthetically generated peptide
gcctcccagcccgcagagcg

SEQ ID NO: 10966 - DNA, 20 bp, Artificial
  Synthetically generated peptide
cctcccagcccgcagagcgc

SEQ ID NO: 10967 - DNA, 20 bp, Artificial
  Synthetically generated peptide
ctcccagcccgcagagcgcg

SEQ ID NO: 10968 - DNA, 20 bp, Artificial
  Synthetically generated peptide
tcccagcccgcagagcgcgg

SEQ ID NO: 10969 - DNA, 20 bp, Artificial
  Synthetically generated peptide
cccagcccgcagagcgcggg

SEQ ID NO: 10970 - DNA, 20 bp, Artificial
  Synthetically generated peptide
ccagcccgcagagcgcggga

SEQ ID NO: 10971 - DNA, 20 bp, Artificial
  Synthetically generated peptide
cagcccgcagagcgcgggat

SEQ ID NO: 10972 - DNA, 20 bp, Artificial
  Synthetically generated peptide
agcccgcagagcgcgggatg

SEQ ID NO: 10973 - DNA, 20 bp, Artificial
  Synthetically generated peptide
gcccgcagagcgcgggatgg

SEQ ID NO: 10974 - DNA, 20 bp, Artificial
  Synthetically generated peptide
cccgcagagcgcgggatggc

SEQ ID NO: 10975 - DNA, 20 bp, Artificial
  Synthetically generated peptide
ccgcagagcgcgggatggct

SEQ ID NO: 10976 - DNA, 20 bp, Artificial
  Synthetically generated peptide
cgcagagcgcgggatggctc

SEQ ID NO: 10977 - DNA, 20 bp, Artificial
  Synthetically generated peptide
gcagagcgcgggatggctct

SEQ ID NO: 10978 - DNA, 20 bp, Artificial
  Synthetically generated peptide
cagagcgcgggatggctctg

SEQ ID NO: 10979 - DNA, 20 bp, Artificial
  Synthetically generated peptide
agagcgcgggatggctctgg

SEQ ID NO: 10980 - DNA, 20 bp, Artificial
  Synthetically generated peptide
gagcgcgggatggctctggg

SEQ ID NO: 10981 - DNA, 20 bp, Artificial
  Synthetically generated peptide
agcgcgggatggctctgggc

SEQ ID NO: 10982 - DNA, 20 bp, Artificial
  Synthetically generated peptide
gcgcgggatggctctgggct

SEQ ID NO: 10983 - DNA, 20 bp, Artificial
  Synthetically generated peptide
cgcgggatggctctgggctc

SEQ ID NO: 10984 - DNA, 20 bp, Artificial
  Synthetically generated peptide
gcgggatggctctgggctca

SEQ ID NO: 10985 - DNA, 20 bp, Artificial
  Synthetically generated peptide
cgggatggctctgggctcag

SEQ ID NO: 10986 - DNA, 20 bp, Artificial
  Synthetically generated peptide
gctgcgcaggactcgcgtcc

SEQ ID NO: 10987 - DNA, 20 bp, Artificial
  Synthetically generated peptide
ggctgcgcaggactcgcgtc

SEQ ID NO: 10988 - DNA, 20 bp, Artificial
  Synthetically generated peptide
cggctgcgcaggactcgcgt

SEQ ID NO: 10989 - DNA, 20 bp, Artificial
  Synthetically generated peptide
tcggctgcgcaggactcgcg

SEQ ID NO: 10990 - DNA, 20 bp, Artificial
  Synthetically generated peptide
ctcggctgcgcaggactcgc

SEQ ID NO: 10991 - DNA, 20 bp, Artificial
  Synthetically generated peptide
cctcggctgcgcaggactcg

SEQ ID NO: 10992 - DNA, 20 bp, Artificial
  Synthetically generated peptide
acctcggctgcgcaggactc

SEQ ID NO: 10993 - DNA, 20 bp, Artificial
  Synthetically generated peptide
aacctcggctgcgcaggact

SEQ ID NO: 10994 - DNA, 20 bp, Artificial
  Synthetically generated peptide
gaacctcggctgcgcaggac

SEQ ID NO: 10995 - DNA, 20 bp, Artificial
  Synthetically generated peptide
ggaacctcggctgcgcagga

SEQ ID NO: 10996 - DNA, 20 bp, Artificial
  Synthetically generated peptide
gggaacctcggctgcgcagg

SEQ ID NO: 10997 - DNA, 20 bp, Artificial
  Synthetically generated peptide
ggggaacctcggctgcgcag

SEQ ID NO: 10998 - DNA, 20 bp, Artificial
  Synthetically generated peptide
tggggaacctcggctgcgca

SEQ ID NO: 10999 - DNA, 20 bp, Artificial
  Synthetically generated peptide
ctggggaacctcggctgcgc

SEQ ID NO: 11000 - DNA, 20 bp, Artificial
  Synthetically generated peptide
gctggggaacctcggctgcg

SEQ ID NO: 11001 - DNA, 20 bp, Artificial
  Synthetically generated peptide
cgctggggaacctcggctgc

SEQ ID NO: 11002 - DNA, 20 bp, Artificial
  Synthetically generated peptide
gcgctggggaacctcggctg

SEQ ID NO: 11003 - DNA, 20 bp, Artificial
  Synthetically generated peptide
ggcgctggggaacctcggct

SEQ ID NO: 11004 - DNA, 20 bp, Artificial
  Synthetically generated peptide
gggcgctggggaacctcggc

SEQ ID NO: 11005 - DNA, 20 bp, Artificial
  Synthetically generated peptide
ggggcgctggggaacctcgg

SEQ ID NO: 11006 - DNA, 20 bp, Artificial
  Synthetically generated peptide
gggggcgctggggaacctcg

SEQ ID NO: 11007 - DNA, 20 bp, Artificial
  Synthetically generated peptide
agggggcgctggggaacctc

SEQ ID NO: 11008 - DNA, 20 bp, Artificial
  Synthetically generated peptide
cagggggcgctggggaacct

SEQ ID NO: 11009 - DNA, 22 bp, Artificial
  Synthetically generated peptide
cccgcagagcgcgggatggctc

SEQ ID NO: 11010 - DNA, 20 bp, Artificial
  Synthetically generated peptide
ccgcagagcgcgggatggct

SEQ ID NO: 11011 - DNA, 20 bp, Artificial
  Synthetically generated peptide
cgcagagcgcgggatggctc

SEQ ID NO: 11012 - DNA, 20 bp, Artificial
  Synthetically generated peptide
gcagagcgcgggatggctct

SEQ ID NO: 11013 - DNA, 20 bp, Artificial
  Synthetically generated peptide
cagagcgcgggatggctctg

SEQ ID NO: 11014 - DNA, 20 bp, Artificial
  Synthetically generated peptide
agagcgcgggatggctctgg

SEQ ID NO: 11015 - DNA, 20 bp, Artificial
  Synthetically generated peptide
gagcgcgggatggctctggg

SEQ ID NO: 11016 - DNA, 20 bp, Artificial
  Synthetically generated peptide
agcgcgggatggctctgggc

SEQ ID NO: 11017 - DNA, 20 bp, Artificial
  Synthetically generated peptide
gcgcgggatggctctgggct

SEQ ID NO: 11018 - DNA, 20 bp, Artificial
  Synthetically generated peptide
cgcgggatggctctgggctc

SEQ ID NO: 11019 - DNA, 20 bp, Artificial
  Synthetically generated peptide
gcgggatggctctgggctca

SEQ ID NO: 11020 - DNA, 20 bp, Artificial
  Synthetically generated peptide
cgggatggctctgggctcag

SEQ ID NO: 11021 - DNA, 20 bp, Artificial
  Synthetically generated peptide
gcccgcagagcgcgggatgg

SEQ ID NO: 11022 - DNA, 20 bp, Artificial
  Synthetically generated peptide
agcccgcagagcgcgggatg

SEQ ID NO: 11023 - DNA, 20 bp, Artificial
  Synthetically generated peptide
cagcccgcagagcgcgggat

SEQ ID NO: 11024 - DNA, 20 bp, Artificial
  Synthetically generated peptide
ccagcccgcagagcgcggga

SEQ ID NO: 11025 - DNA, 20 bp, Artificial
  Synthetically generated peptide
cccagcccgcagagcgcggg

SEQ ID NO: 11026 - DNA, 20 bp, Artificial
  Synthetically generated peptide
tcccagcccgcagagcgcgg

SEQ ID NO: 11027 - DNA, 20 bp, Artificial
  Synthetically generated peptide
ctcccagcccgcagagcgcg

SEQ ID NO: 11028 - DNA, 20 bp, Artificial
  Synthetically generated peptide
cctcccagcccgcagagcgc

SEQ ID NO: 11029 - DNA, 20 bp, Artificial
  Synthetically generated peptide
gcctcccagcccgcagagcg

SEQ ID NO: 11030 - DNA, 20 bp, Artificial
  Synthetically generated peptide
ggcctcccagcccgcagagc

SEQ ID NO: 11031 - DNA, 20 bp, Artificial
  Synthetically generated peptide
gggcctcccagcccgcagag

SEQ ID NO: 11032 - DNA, 20 bp, Artificial
  Synthetically generated peptide
cgggcctcccagcccgcaga

SEQ ID NO: 11033 - DNA, 20 bp, Artificial
  Synthetically generated peptide
ccgggcctcccagcccgcag

SEQ ID NO: 11034 - DNA, 20 bp, Artificial
  Synthetically generated peptide
cccgggcctcccagcccgca

SEQ ID NO: 11035 - DNA, 20 bp, Artificial
  Synthetically generated peptide
gcccgggcctcccagcccgc

SEQ ID NO: 11036 - DNA, 20 bp, Artificial
  Synthetically generated peptide
ggcccgggcctcccagcccg

SEQ ID NO: 11037 - DNA, 20 bp, Artificial
  Synthetically generated peptide
tggcccgggcctcccagccc

SEQ ID NO: 11038 - DNA, 20 bp, Artificial
  Synthetically generated peptide
ctggcccgggcctcccagcc

SEQ ID NO: 11039 - DNA, 20 bp, Artificial
  Synthetically generated peptide
cctggcccgggcctcccagc

SEQ ID NO: 11040 - DNA, 20 bp, Artificial
  Synthetically generated peptide
tcctggcccgggcctcccag

SEQ ID NO: 11041 - DNA, 20 bp, Artificial
  Synthetically generated peptide
gtcctggcccgggcctccca

SEQ ID NO: 11042 - DNA, 20 bp, Artificial
  Synthetically generated peptide
cgtcctggcccgggcctccc

SEQ ID NO: 11043 - DNA, 20 bp, Artificial
  Synthetically generated peptide
gcgtcctggcccgggcctcc

SEQ ID NO: 11044 - DNA, 20 bp, Artificial
  Synthetically generated peptide
cgcgtcctggcccgggcctc

SEQ ID NO: 11045 - DNA, 20 bp, Artificial
  Synthetically generated peptide
tcgcgtcctggcccgggcct

SEQ ID NO: 11046 - DNA, 20 bp, Artificial
  Synthetically generated peptide
ctcgcgtcctggcccgggcc

SEQ ID NO: 11047 - DNA, 20 bp, Artificial
  Synthetically generated peptide
actcgcgtcctggcccgggc

SEQ ID NO: 11048 - DNA, 20 bp, Artificial
  Synthetically generated peptide
gactcgcgtcctggcccggg

SEQ ID NO: 11049 - DNA, 20 bp, Artificial
  Synthetically generated peptide
ggactcgcgtcctggcccgg

SEQ ID NO: 11050 - DNA, 20 bp, Artificial
  Synthetically generated peptide
aggactcgcgtcctggcccg

SEQ ID NO: 11051 - DNA, 20 bp, Artificial
  Synthetically generated peptide
caggactcgcgtcctggccc

SEQ ID NO: 11052 - DNA, 20 bp, Artificial
  Synthetically generated peptide
gcaggactcgcgtcctggcc

SEQ ID NO: 11053 - DNA, 20 bp, Artificial
  Synthetically generated peptide
cgcaggactcgcgtcctggc

SEQ ID NO: 11054 - DNA, 20 bp, Artificial
  Synthetically generated peptide
gcgcaggactcgcgtcctgg

SEQ ID NO: 11055 - DNA, 20 bp, Artificial
  Synthetically generated peptide
tgcgcaggactcgcgtcctg

SEQ ID NO: 11056 - DNA, 20 bp, Artificial
  Synthetically generated peptide
ctgcgcaggactcgcgtcct

SEQ ID NO: 11057 - DNA, 20 bp, Artificial
  Synthetically generated peptide
gctgcgcaggactcgcgtcc

SEQ ID NO: 11058 - DNA, 20 bp, Artificial
  Synthetically generated peptide
ggctgcgcaggactcgcgtc

SEQ ID NO: 11059 - DNA, 20 bp, Artificial
  Synthetically generated peptide
cggctgcgcaggactcgcgt

SEQ ID NO: 11060 - DNA, 20 bp, Artificial
  Synthetically generated peptide
tcggctgcgcaggactcgcg

SEQ ID NO: 11061 - DNA, 20 bp, Artificial
  Synthetically generated peptide
ctcggctgcgcaggactcgc

SEQ ID NO: 11062 - DNA, 20 bp, Artificial
  Synthetically generated peptide
cctcggctgcgcaggactcg

SEQ ID NO: 11063 - DNA, 20 bp, Artificial
  Synthetically generated peptide
acctcggctgcgcaggactc

SEQ ID NO: 11064 - DNA, 20 bp, Artificial
  Synthetically generated peptide
aacctcggctgcgcaggact

SEQ ID NO: 11065 - DNA, 20 bp, Artificial
  Synthetically generated peptide
gaacctcggctgcgcaggac

SEQ ID NO: 11066 - DNA, 20 bp, Artificial
  Synthetically generated peptide
ggaacctcggctgcgcagga

SEQ ID NO: 11067 - DNA, 20 bp, Artificial
  Synthetically generated peptide
gggaacctcggctgcgcagg

SEQ ID NO: 11068 - DNA, 20 bp, Artificial
  Synthetically generated peptide
ggggaacctcggctgcgcag

SEQ ID NO: 11069 - DNA, 20 bp, Artificial
  Synthetically generated peptide
tggggaacctcggctgcgca

SEQ ID NO: 11070 - DNA, 20 bp, Artificial
  Synthetically generated peptide
ctggggaacctcggctgcgc

SEQ ID NO: 11071 - DNA, 20 bp, Artificial
  Synthetically generated peptide
gctggggaacctcggctgcg

SEQ ID NO: 11072 - DNA, 20 bp, Artificial
  Synthetically generated peptide
cgctggggaacctcggctgc

SEQ ID NO: 11073 - DNA, 20 bp, Artificial
  Synthetically generated peptide
gcgctggggaacctcggctg

SEQ ID NO: 11074 - DNA, 20 bp, Artificial
  Synthetically generated peptide
ggcgctggggaacctcggct

SEQ ID NO: 11075 - DNA, 20 bp, Artificial
  Synthetically generated peptide
gggcgctggggaacctcggc

SEQ ID NO: 11076 - DNA, 20 bp, Artificial
  Synthetically generated peptide
ggggcgctggggaacctcgg

SEQ ID NO: 11077 - DNA, 20 bp, Artificial
  Synthetically generated peptide
gggggcgctggggaacctcg

SEQ ID NO: 11078 - DNA, 20 bp, Artificial
  Synthetically generated peptide
agggggcgctggggaacctc

SEQ ID NO: 11079 - DNA, 20 bp, Artificial
  Synthetically generated peptide
cagggggcgctggggaacct

SEQ ID NO: 11080 - DNA, 27 bp, Artificial
  Synthetically generated peptide
cggacctgatggggcacgggcttcccc

SEQ ID NO: 11081 - DNA, 20 bp, Artificial
  Synthetically generated peptide
ggacctgatggggcacgggc

SEQ ID NO: 11082 - DNA, 20 bp, Artificial
  Synthetically generated peptide
gacctgatggggcacgggct

SEQ ID NO: 11083 - DNA, 20 bp, Artificial
  Synthetically generated peptide
acctgatggggcacgggctt

SEQ ID NO: 11084 - DNA, 20 bp, Artificial
  Synthetically generated peptide
cctgatggggcacgggcttc

SEQ ID NO: 11085 - DNA, 20 bp, Artificial
  Synthetically generated peptide
ctgatggggcacgggcttcc

SEQ ID NO: 11086 - DNA, 20 bp, Artificial
  Synthetically generated peptide
tgatggggcacgggcttccc

SEQ ID NO: 11087 - DNA, 20 bp, Artificial
  Synthetically generated peptide
gatggggcacgggcttcccc

SEQ ID NO: 11088 - DNA, 20 bp, Artificial
  Synthetically generated peptide
atggggcacgggcttcccct

SEQ ID NO: 11089 - DNA, 20 bp, Artificial
  Synthetically generated peptide
tggggcacgggcttcccctt

SEQ ID NO: 11090 - DNA, 20 bp, Artificial
  Synthetically generated peptide
ggggcacgggcttccccttt

SEQ ID NO: 11091 - DNA, 20 bp, Artificial
  Synthetically generated peptide
gggcacgggcttcccctttt

SEQ ID NO: 11092 - DNA, 20 bp, Artificial
  Synthetically generated peptide
ggcacgggcttcccctttta

SEQ ID NO: 11093 - DNA, 20 bp, Artificial
  Synthetically generated peptide
gcacgggcttccccttttaa

SEQ ID NO: 11094 - DNA, 20 bp, Artificial
  Synthetically generated peptide
cacgggcttccccttttaac

SEQ ID NO: 11095 - DNA, 20 bp, Artificial
  Synthetically generated peptide
acgggcttccccttttaacg

SEQ ID NO: 11096 - DNA, 20 bp, Artificial
  Synthetically generated peptide
cgggcttccccttttaacgg

SEQ ID NO: 11097 - DNA, 20 bp, Artificial
  Synthetically generated peptide
gggcttccccttttaacggt

SEQ ID NO: 11098 - DNA, 20 bp, Artificial
  Synthetically generated peptide
ggcttccccttttaacggtg

SEQ ID NO: 11099 - DNA, 20 bp, Artificial
  Synthetically generated peptide
gcttccccttttaacggtgg

SEQ ID NO: 11100 - DNA, 20 bp, Artificial
  Synthetically generated peptide
cttccccttttaacggtggt

SEQ ID NO: 11101 - DNA, 20 bp, Artificial
  Synthetically generated peptide
ttccccttttaacggtggtt

SEQ ID NO: 11102 - DNA, 20 bp, Artificial
  Synthetically generated peptide
tccccttttaacggtggttg

SEQ ID NO: 11103 - DNA, 20 bp, Artificial
  Synthetically generated peptide
ccccttttaacggtggttgg

SEQ ID NO: 11104 - DNA, 20 bp, Artificial
  Synthetically generated peptide
cccttttaacggtggttggg

SEQ ID NO: 11105 - DNA, 20 bp, Artificial
  Synthetically generated peptide
ccttttaacggtggttgggg

SEQ ID NO: 11106 - DNA, 20 bp, Artificial
  Synthetically generated peptide
cttttaacggtggttggggc

SEQ ID NO: 11107 - DNA, 20 bp, Artificial
  Synthetically generated peptide
ttttaacggtggttggggcc

SEQ ID NO: 11108 - DNA, 20 bp, Artificial
  Synthetically generated peptide
tttaacggtggttggggcct

SEQ ID NO: 11109 - DNA, 20 bp, Artificial
  Synthetically generated peptide
ttaacggtggttggggccta

SEQ ID NO: 11110 - DNA, 20 bp, Artificial
  Synthetically generated peptide
taacggtggttggggcctag

SEQ ID NO: 11111 - DNA, 20 bp, Artificial
  Synthetically generated peptide
aacggtggttggggcctaga

SEQ ID NO: 11112 - DNA, 20 bp, Artificial
  Synthetically generated peptide
acggtggttggggcctagaa

SEQ ID NO: 11113 - DNA, 20 bp, Artificial
  Synthetically generated peptide
cggtggttggggcctagaag

SEQ ID NO: 11114 - DNA, 20 bp, Artificial
  Synthetically generated peptide
gcggacctgatggggcacgg

SEQ ID NO: 11115 - DNA, 20 bp, Artificial
  Synthetically generated peptide
agcggacctgatggggcacg

SEQ ID NO: 11116 - DNA, 20 bp, Artificial
  Synthetically generated peptide
gagcggacctgatggggcac

SEQ ID NO: 11117 - DNA, 22 bp, Artificial
  Synthetically generated peptide
cggtggttggggcctagaagcg

SEQ ID NO: 11118 - DNA, 20 bp, Artificial
  Synthetically generated peptide
acggtggttggggcctagaa

SEQ ID NO: 11119 - DNA, 20 bp, Artificial
  Synthetically generated peptide
aacggtggttggggcctaga

SEQ ID NO: 11120 - DNA, 20 bp, Artificial
  Synthetically generated peptide
taacggtggttggggcctag

SEQ ID NO: 11121 - DNA, 20 bp, Artificial
  Synthetically generated peptide
ttaacggtggttggggccta

SEQ ID NO: 11122 - DNA, 20 bp, Artificial
  Synthetically generated peptide
tttaacggtggttggggcct

SEQ ID NO: 11123 - DNA, 20 bp, Artificial
  Synthetically generated peptide
ttttaacggtggttggggcc

SEQ ID NO: 11124 - DNA, 20 bp, Artificial
  Synthetically generated peptide
cttttaacggtggttggggc

SEQ ID NO: 11125 - DNA, 20 bp, Artificial
  Synthetically generated peptide
ccttttaacggtggttgggg

SEQ ID NO: 11126 - DNA, 20 bp, Artificial
  Synthetically generated peptide
cccttttaacggtggttggg

SEQ ID NO: 11127 - DNA, 20 bp, Artificial
  Synthetically generated peptide
ccccttttaacggtggttgg

SEQ ID NO: 11128 - DNA, 20 bp, Artificial
  Synthetically generated peptide
tccccttttaacggtggttg

SEQ ID NO: 11129 - DNA, 20 bp, Artificial
  Synthetically generated peptide
ttccccttttaacggtggtt

SEQ ID NO: 11130 - DNA, 20 bp, Artificial
  Synthetically generated peptide
cttccccttttaacggtggt

SEQ ID NO: 11131 - DNA, 20 bp, Artificial
  Synthetically generated peptide
gcttccccttttaacggtgg

SEQ ID NO: 11132 - DNA, 20 bp, Artificial
  Synthetically generated peptide
ggcttccccttttaacggtg

SEQ ID NO: 11133 - DNA, 20 bp, Artificial
  Synthetically generated peptide
gggcttccccttttaacggt

SEQ ID NO: 11134 - DNA, 20 bp, Artificial
  Synthetically generated peptide
cgggcttccccttttaacgg

SEQ ID NO: 11135 - DNA, 20 bp, Artificial
  Synthetically generated peptide
acgggcttccccttttaacg

SEQ ID NO: 11136 - DNA, 20 bp, Artificial
  Synthetically generated peptide
cacgggcttccccttttaac

SEQ ID NO: 11137 - DNA, 20 bp, Artificial
  Synthetically generated peptide
gcacgggcttccccttttaa

SEQ ID NO: 11138 - DNA, 20 bp, Artificial
  Synthetically generated peptide
ggcacgggcttcccctttta

SEQ ID NO: 11139 - DNA, 20 bp, Artificial
  Synthetically generated peptide
gggcacgggcttcccctttt

SEQ ID NO: 11140 - DNA, 20 bp, Artificial
  Synthetically generated peptide
ggggcacgggcttccccttt

SEQ ID NO: 11141 - DNA, 20 bp, Artificial
  Synthetically generated peptide
tggggcacgggcttcccctt

SEQ ID NO: 11142 - DNA, 20 bp, Artificial
  Synthetically generated peptide
atggggcacgggcttcccct

SEQ ID NO: 11143 - DNA, 20 bp, Artificial
  Synthetically generated peptide
gatggggcacgggcttcccc

SEQ ID NO: 11144 - DNA, 20 bp, Artificial
  Synthetically generated peptide
tgatggggcacgggcttccc

SEQ ID NO: 11145 - DNA, 20 bp, Artificial
  Synthetically generated peptide
ctgatggggcacgggcttcc

SEQ ID NO: 11146 - DNA, 20 bp, Artificial
  Synthetically generated peptide
cctgatggggcacgggcttc

SEQ ID NO: 11147 - DNA, 20 bp, Artificial
  Synthetically generated peptide
acctgatggggcacgggctt

SEQ ID NO: 11148 - DNA, 20 bp, Artificial
  Synthetically generated peptide
gacctgatggggcacgggct

SEQ ID NO: 11149 - DNA, 20 bp, Artificial
  Synthetically generated peptide
ggacctgatggggcacgggc

SEQ ID NO: 11150 - DNA, 20 bp, Artificial
  Synthetically generated peptide
cggacctgatggggcacggg

SEQ ID NO: 11151 - DNA, 20 bp, Artificial
  Synthetically generated peptide
gcggacctgatggggcacgg

SEQ ID NO: 11152 - DNA, 20 bp, Artificial
  Synthetically generated peptide
agcggacctgatggggcacg

SEQ ID NO: 11153 - DNA, 20 bp, Artificial
  Synthetically generated peptide
gagcggacctgatggggcac

SEQ ID NO: 11154 - DNA, 29 bp, Artificial
  Synthetically generated peptide
cgcgcccctcgctgtgaccgcccagcccg

SEQ ID NO: 11155 - DNA, 20 bp, Artificial
  Synthetically generated peptide
gcgcccctcgctgtgaccgc

SEQ ID NO: 11156 - DNA, 20 bp, Artificial
  Synthetically generated peptide
cgcccctcgctgtgaccgcc

SEQ ID NO: 11157 - DNA, 20 bp, Artificial
  Synthetically generated peptide
gcccctcgctgtgaccgccc

SEQ ID NO: 11158 - DNA, 20 bp, Artificial
  Synthetically generated peptide
cccctcgctgtgaccgccca

SEQ ID NO: 11159 - DNA, 20 bp, Artificial
  Synthetically generated peptide
ccctcgctgtgaccgcccag

SEQ ID NO: 11160 - DNA, 20 bp, Artificial
  Synthetically generated peptide
cctcgctgtgaccgcccagc

SEQ ID NO: 11161 - DNA, 20 bp, Artificial
  Synthetically generated peptide
ctcgctgtgaccgcccagcc

SEQ ID NO: 11162 - DNA, 20 bp, Artificial
  Synthetically generated peptide
tcgctgtgaccgcccagccc

SEQ ID NO: 11163 - DNA, 20 bp, Artificial
  Synthetically generated peptide
cgctgtgaccgcccagcccg

SEQ ID NO: 11164 - DNA, 20 bp, Artificial
  Synthetically generated peptide
gctgtgaccgcccagcccgg

SEQ ID NO: 11165 - DNA, 20 bp, Artificial
  Synthetically generated peptide
ctgtgaccgcccagcccggc

SEQ ID NO: 11166 - DNA, 20 bp, Artificial
  Synthetically generated peptide
tgtgaccgcccagcccggcg

SEQ ID NO: 11167 - DNA, 20 bp, Artificial
  Synthetically generated peptide
gtgaccgcccagcccggcgt

SEQ ID NO: 11168 - DNA, 20 bp, Artificial
  Synthetically generated peptide
tgaccgcccagcccggcgtg

SEQ ID NO: 11169 - DNA, 20 bp, Artificial
  Synthetically generated peptide
gaccgcccagcccggcgtgg

SEQ ID NO: 11170 - DNA, 20 bp, Artificial
  Synthetically generated peptide
accgcccagcccggcgtggc

SEQ ID NO: 11171 - DNA, 20 bp, Artificial
  Synthetically generated peptide
ccgcccagcccggcgtggcc

SEQ ID NO: 11172 - DNA, 20 bp, Artificial
  Synthetically generated peptide
cgcccagcccggcgtggccc

SEQ ID NO: 11173 - DNA, 20 bp, Artificial
  Synthetically generated peptide
gcccagcccggcgtggccca

SEQ ID NO: 11174 - DNA, 20 bp, Artificial
  Synthetically generated peptide
cccagcccggcgtggcccaa

SEQ ID NO: 11175 - DNA, 20 bp, Artificial
  Synthetically generated peptide
ccagcccggcgtggcccaaa

SEQ ID NO: 11176 - DNA, 20 bp, Artificial
  Synthetically generated peptide
cagcccggcgtggcccaaat

SEQ ID NO: 11177 - DNA, 20 bp, Artificial
  Synthetically generated peptide
agcccggcgtggcccaaatg

SEQ ID NO: 11178 - DNA, 20 bp, Artificial
  Synthetically generated peptide
gcccggcgtggcccaaatgc

SEQ ID NO: 11179 - DNA, 20 bp, Artificial
  Synthetically generated peptide
cccggcgtggcccaaatgcc

SEQ ID NO: 11180 - DNA, 20 bp, Artificial
  Synthetically generated peptide
ccggcgtggcccaaatgcca

SEQ ID NO: 11181 - DNA, 20 bp, Artificial
  Synthetically generated peptide
cggcgtggcccaaatgccag

SEQ ID NO: 11182 - DNA, 20 bp, Artificial
  Synthetically generated peptide
ggcgtggcccaaatgccagc

SEQ ID NO: 11183 - DNA, 20 bp, Artificial
  Synthetically generated peptide
gcgtggcccaaatgccagcc

SEQ ID NO: 11184 - DNA, 20 bp, Artificial
  Synthetically generated peptide
cgtggcccaaatgccagcca

SEQ ID NO: 11185 - DNA, 20 bp, Artificial
  Synthetically generated peptide
gcgcgcccctcgctgtgacc

SEQ ID NO: 11186 - DNA, 20 bp, Artificial
  Synthetically generated peptide
tgcgcgcccctcgctgtgac

SEQ ID NO: 11187 - DNA, 20 bp, Artificial
  Synthetically generated peptide
ctgcgcgcccctcgctgtga

SEQ ID NO: 11188 - DNA, 20 bp, Artificial
  Synthetically generated peptide
actgcgcgcccctcgctgtg

SEQ ID NO: 11189 - DNA, 20 bp, Artificial
  Synthetically generated peptide
aactgcgcgcccctcgctgt

SEQ ID NO: 11190 - DNA, 20 bp, Artificial
  Synthetically generated peptide
aaactgcgcgcccctcgctg

SEQ ID NO: 11191 - DNA, 20 bp, Artificial
  Synthetically generated peptide
caaactgcgcgcccctcgct

SEQ ID NO: 11192 - DNA, 20 bp, Artificial
  Synthetically generated peptide
ccaaactgcgcgcccctcgc

SEQ ID NO: 11193 - DNA, 20 bp, Artificial
  Synthetically generated peptide
cccaaactgcgcgcccctcg

SEQ ID NO: 11194 - DNA, 20 bp, Artificial
  Synthetically generated peptide
ccccaaactgcgcgcccctc

SEQ ID NO: 11195 - DNA, 20 bp, Artificial
  Synthetically generated peptide
accccaaactgcgcgcccct

SEQ ID NO: 11196 - DNA, 20 bp, Artificial
  Synthetically generated peptide
gaccccaaactgcgcgcccc

SEQ ID NO: 11197 - DNA, 20 bp, Artificial
  Synthetically generated peptide
tgaccccaaactgcgcgccc

SEQ ID NO: 11198 - DNA, 20 bp, Artificial
  Synthetically generated peptide
gtgaccccaaactgcgcgcc

SEQ ID NO: 11199 - DNA, 20 bp, Artificial
  Synthetically generated peptide
tgtgaccccaaactgcgcgc

SEQ ID NO: 11200 - DNA, 20 bp, Artificial
  Synthetically generated peptide
gtgtgaccccaaactgcgcg

SEQ ID NO: 11201 - DNA, 20 bp, Artificial
  Synthetically generated peptide
tgtgtgaccccaaactgcgc

SEQ ID NO: 11202 - DNA, 20 bp, Artificial
  Synthetically generated peptide
ctgtgtgaccccaaactgcg

SEQ ID NO: 11203 - DNA, 28 bp, Artificial
  Synthetically generated peptide
cggggagtgggactgcggcggggagccg

SEQ ID NO: 11204 - DNA, 20 bp, Artificial
  Synthetically generated peptide
tcggggagtgggactgcggc

SEQ ID NO: 11205 - DNA, 20 bp, Artificial
  Synthetically generated peptide
ctcggggagtgggactgcgg

SEQ ID NO: 11206 - DNA, 20 bp, Artificial
  Synthetically generated peptide
actcggggagtgggactgcg

SEQ ID NO: 11207 - DNA, 20 bp, Artificial
  Synthetically generated peptide
aactcggggagtgggactgc

SEQ ID NO: 11208 - DNA, 24 bp, Artificial
  Synthetically generated peptide
actcgccgaaggcccctggggaac

SEQ ID NO: 11209 - DNA, 20 bp, Artificial
  Synthetically generated peptide
ctcgccgaaggcccctgggg

SEQ ID NO: 11210 - DNA, 20 bp, Artificial
  Synthetically generated peptide
tcgccgaaggcccctgggga

SEQ ID NO: 11211 - DNA, 20 bp, Artificial
  Synthetically generated peptide
cgccgaaggcccctggggaa

SEQ ID NO: 11212 - DNA, 20 bp, Artificial
  Synthetically generated peptide
gccgaaggcccctggggaac

SEQ ID NO: 11213 - DNA, 20 bp, Artificial
  Synthetically generated peptide
ccgaaggcccctggggaaca

SEQ ID NO: 11214 - DNA, 20 bp, Artificial
  Synthetically generated peptide
cgaaggcccctggggaacat

SEQ ID NO: 11215 - DNA, 20 bp, Artificial
  Synthetically generated peptide
gactcgccgaaggcccctgg

SEQ ID NO: 11216 - DNA, 20 bp, Artificial
  Synthetically generated peptide
agactcgccgaaggcccctg

SEQ ID NO: 11217 - DNA, 20 bp, Artificial
  Synthetically generated peptide
aagactcgccgaaggcccct

SEQ ID NO: 11218 - DNA, 20 bp, Artificial
  Synthetically generated peptide
aaagactcgccgaaggcccc

SEQ ID NO: 11219 - DNA, 20 bp, Artificial
  Synthetically generated peptide
aaaagactcgccgaaggccc

SEQ ID NO: 11220 - DNA, 20 bp, Artificial
  Synthetically generated peptide
aaaaagactcgccgaaggcc

SEQ ID NO: 11221 - DNA, 20 bp, Artificial
  Synthetically generated peptide
caaaaagactcgccgaaggc

SEQ ID NO: 11222 - DNA, 21 bp, Artificial
  Synthetically generated peptide
cgggctgcatgcgtgagcagg

SEQ ID NO: 11223 - DNA, 20 bp, Artificial
  Synthetically generated peptide
gggctgcatgcgtgagcagg

SEQ ID NO: 11224 - DNA, 20 bp, Artificial
  Synthetically generated peptide
ggctgcatgcgtgagcaggc

SEQ ID NO: 11225 - DNA, 20 bp, Artificial
  Synthetically generated peptide
gctgcatgcgtgagcaggct

SEQ ID NO: 11226 - DNA, 20 bp, Artificial
  Synthetically generated peptide
ctgcatgcgtgagcaggcta

SEQ ID NO: 11227 - DNA, 20 bp, Artificial
  Synthetically generated peptide
tgcatgcgtgagcaggctag

SEQ ID NO: 11228 - DNA, 20 bp, Artificial
  Synthetically generated peptide
gcatgcgtgagcaggctagc

SEQ ID NO: 11229 - DNA, 20 bp, Artificial
  Synthetically generated peptide
catgcgtgagcaggctagca

SEQ ID NO: 11230 - DNA, 20 bp, Artificial
  Synthetically generated peptide
atgcgtgagcaggctagcag

SEQ ID NO: 11231 - DNA, 20 bp, Artificial
  Synthetically generated peptide
tgcgtgagcaggctagcagc

SEQ ID NO: 11232 - DNA, 20 bp, Artificial
  Synthetically generated peptide
gcgtgagcaggctagcagca

SEQ ID NO: 11233 - DNA, 20 bp, Artificial
  Synthetically generated peptide
cgtgagcaggctagcagcag

SEQ ID NO: 11234 - DNA, 20 bp, Artificial
  Synthetically generated peptide
ccgggctgcatgcgtgagca

SEQ ID NO: 11235 - DNA, 20 bp, Artificial
  Synthetically generated peptide
cccgggctgcatgcgtgagc

SEQ ID NO: 11236 - DNA, 20 bp, Artificial
  Synthetically generated peptide
gcccgggctgcatgcgtgag

SEQ ID NO: 11237 - DNA, 20 bp, Artificial
  Synthetically generated peptide
agcccgggctgcatgcgtga

SEQ ID NO: 11238 - DNA, 20 bp, Artificial
  Synthetically generated peptide
cagcccgggctgcatgcgtg

SEQ ID NO: 11239 - DNA, 20 bp, Artificial
  Synthetically generated peptide
gcagcccgggctgcatgcgt

SEQ ID NO: 11240 - DNA, 20 bp, Artificial
  Synthetically generated peptide
tgcagcccgggctgcatgcg

SEQ ID NO: 11241 - DNA, 20 bp, Artificial
  Synthetically generated peptide
ctgcagcccgggctgcatgc

SEQ ID NO: 11242 - DNA, 20 bp, Artificial
  Synthetically generated peptide
tctgcagcccgggctgcatg

SEQ ID NO: 11243 - DNA, 20 bp, Artificial
  Synthetically generated peptide
ctctgcagcccgggctgcat

SEQ ID NO: 11244 - DNA, 20 bp, Artificial
  Synthetically generated peptide
cctctgcagcccgggctgca

SEQ ID NO: 11245 - DNA, 20 bp, Artificial
  Synthetically generated peptide
tcctctgcagcccgggctgc

SEQ ID NO: 11246 - DNA, 20 bp, Artificial
  Synthetically generated peptide
ttcctctgcagcccgggctg

SEQ ID NO: 11247 - DNA, 20 bp, Artificial
  Synthetically generated peptide
cttcctctgcagcccgggct

SEQ ID NO: 11248 - DNA, 20 bp, Artificial
  Synthetically generated peptide
acttcctctgcagcccgggc

SEQ ID NO: 11249 - DNA, 20 bp, Artificial
  Synthetically generated peptide
cacttcctctgcagcccggg

SEQ ID NO: 11250 - DNA, 20 bp, Artificial
  Synthetically generated peptide
acacttcctctgcagcccgg

SEQ ID NO: 11251 - DNA, 20 bp, Artificial
  Synthetically generated peptide
cacacttcctctgcagcccg

SEQ ID NO: 11252 - DNA, 25 bp, Artificial
  Synthetically generated peptide
cggcaggcggtttaggctgtggctg

SEQ ID NO: 11253 - DNA, 20 bp, Artificial
  Synthetically generated peptide
ggcaggcggtttaggctgtg

SEQ ID NO: 11254 - DNA, 20 bp, Artificial
  Synthetically generated peptide
gcaggcggtttaggctgtgg

SEQ ID NO: 11255 - DNA, 20 bp, Artificial
  Synthetically generated peptide
caggcggtttaggctgtggc

SEQ ID NO: 11256 - DNA, 20 bp, Artificial
  Synthetically generated peptide
aggcggtttaggctgtggct

SEQ ID NO: 11257 - DNA, 20 bp, Artificial
  Synthetically generated peptide
ggcggtttaggctgtggctg

SEQ ID NO: 11258 - DNA, 20 bp, Artificial
  Synthetically generated peptide
gcggtttaggctgtggctga

SEQ ID NO: 11259 - DNA, 20 bp, Artificial
  Synthetically generated peptide
cggtttaggctgtggctgac

SEQ ID NO: 11260 - DNA, 20 bp, Artificial
  Synthetically generated peptide
acggcaggcggtttaggctg

SEQ ID NO: 11261 - DNA, 20 bp, Artificial
  Synthetically generated peptide
aacggcaggcggtttaggct

SEQ ID NO: 11262 - DNA, 20 bp, Artificial
  Synthetically generated peptide
gaacggcaggcggtttaggc

SEQ ID NO: 11263 - DNA, 20 bp, Artificial
  Synthetically generated peptide
tgaacggcaggcggtttagg

SEQ ID NO: 11264 - DNA, 20 bp, Artificial
  Synthetically generated peptide
ctgaacggcaggcggtttag

SEQ ID NO: 11265 - DNA, 20 bp, Artificial
  Synthetically generated peptide
gctgaacggcaggcggttta

SEQ ID NO: 11266 - DNA, 20 bp, Artificial
  Synthetically generated peptide
ggctgaacggcaggcggttt

SEQ ID NO: 11267 - DNA, 20 bp, Artificial
  Synthetically generated peptide
aggctgaacggcaggcggtt

SEQ ID NO: 11268 - DNA, 20 bp, Artificial
  Synthetically generated peptide
caggctgaacggcaggcggt

SEQ ID NO: 11269 - DNA, 20 bp, Artificial
  Synthetically generated peptide
tcaggctgaacggcaggcgg

SEQ ID NO: 11270 - DNA, 20 bp, Artificial
  Synthetically generated peptide
ctcaggctgaacggcaggcg

SEQ ID NO: 11271 - DNA, 20 bp, Artificial
  Synthetically generated peptide
tctcaggctgaacggcaggc

SEQ ID NO: 11272 - DNA, 20 bp, Artificial
  Synthetically generated peptide
ctctcaggctgaacggcagg

SEQ ID NO: 11273 - DNA, 20 bp, Artificial
  Synthetically generated peptide
cctctcaggctgaacggcag

SEQ ID NO: 11274 - DNA, 20 bp, Artificial
  Synthetically generated peptide
gcctctcaggctgaacggca

SEQ ID NO: 11275 - DNA, 20 bp, Artificial
  Synthetically generated peptide
agcctctcaggctgaacggc

SEQ ID NO: 11276 - DNA, 20 bp, Artificial
  Synthetically generated peptide
cagcctctcaggctgaacgg

SEQ ID NO: 11277 - DNA, 20 bp, Artificial
  Synthetically generated peptide
gcagcctctcaggctgaacg

SEQ ID NO: 11278 - DNA, 23 bp, Artificial
  Synthetically generated peptide
ccgattcggattgctccagctgg

SEQ ID NO: 11279 - DNA, 20 bp, Artificial
  Synthetically generated peptide
cgattcggattgctccagct

SEQ ID NO: 11280 - DNA, 20 bp, Artificial
  Synthetically generated peptide
gattcggattgctccagctg

SEQ ID NO: 11281 - DNA, 20 bp, Artificial
  Synthetically generated peptide
attcggattgctccagctgg

SEQ ID NO: 11282 - DNA, 20 bp, Artificial
  Synthetically generated peptide
ttcggattgctccagctggt

SEQ ID NO: 11283 - DNA, 20 bp, Artificial
  Synthetically generated peptide
tcggattgctccagctggta

SEQ ID NO: 11284 - DNA, 20 bp, Artificial
  Synthetically generated peptide
cggattgctccagctggtaa

SEQ ID NO: 11285 - DNA, 20 bp, Artificial
  Synthetically generated peptide
accgattcggattgctccag

SEQ ID NO: 11286 - DNA, 20 bp, Artificial
  Synthetically generated peptide
aaccgattcggattgctcca

SEQ ID NO: 11287 - DNA, 20 bp, Artificial
  Synthetically generated peptide
taaccgattcggattgctcc

SEQ ID NO: 11288 - DNA, 20 bp, Artificial
  Synthetically generated peptide
ttaaccgattcggattgctc

SEQ ID NO: 11289 - DNA, 23 bp, Artificial
  Synthetically generated peptide
cgcacccactcagttgccacggg

SEQ ID NO: 11290 - DNA, 20 bp, Artificial
  Synthetically generated peptide
gcacccactcagttgccacg

SEQ ID NO: 11291 - DNA, 20 bp, Artificial
  Synthetically generated peptide
cacccactcagttgccacgg

SEQ ID NO: 11292 - DNA, 20 bp, Artificial
  Synthetically generated peptide
acccactcagttgccacggg

SEQ ID NO: 11293 - DNA, 20 bp, Artificial
  Synthetically generated peptide
cccactcagttgccacggga

SEQ ID NO: 11294 - DNA, 20 bp, Artificial
  Synthetically generated peptide
ccactcagttgccacgggac

SEQ ID NO: 11295 - DNA, 20 bp, Artificial
  Synthetically generated peptide
cactcagttgccacgggaca

SEQ ID NO: 11296 - DNA, 20 bp, Artificial
  Synthetically generated peptide
actcagttgccacgggacac

SEQ ID NO: 11297 - DNA, 20 bp, Artificial
  Synthetically generated peptide
ctcagttgccacgggacaca

SEQ ID NO: 11298 - DNA, 20 bp, Artificial
  Synthetically generated peptide
tcagttgccacgggacacac

SEQ ID NO: 11299 - DNA, 20 bp, Artificial
  Synthetically generated peptide
cagttgccacgggacacacc

SEQ ID NO: 11300 - DNA, 20 bp, Artificial
  Synthetically generated peptide
agttgccacgggacacacct

SEQ ID NO: 11301 - DNA, 20 bp, Artificial
  Synthetically generated peptide
gttgccacgggacacacctg

SEQ ID NO: 11302 - DNA, 20 bp, Artificial
  Synthetically generated peptide
ttgccacgggacacacctgc

SEQ ID NO: 11303 - DNA, 20 bp, Artificial
  Synthetically generated peptide
tgccacgggacacacctgct

SEQ ID NO: 11304 - DNA, 20 bp, Artificial
  Synthetically generated peptide
gccacgggacacacctgctt

SEQ ID NO: 11305 - DNA, 20 bp, Artificial
  Synthetically generated peptide
ccacgggacacacctgcttt

SEQ ID NO: 11306 - DNA, 20 bp, Artificial
  Synthetically generated peptide
cacgggacacacctgctttt

SEQ ID NO: 11307 - DNA, 20 bp, Artificial
  Synthetically generated peptide
acgggacacacctgctttta

SEQ ID NO: 11308 - DNA, 20 bp, Artificial
  Synthetically generated peptide
cgggacacacctgcttttag

SEQ ID NO: 11309 - DNA, 20 bp, Artificial
  Synthetically generated peptide
acgcacccactcagttgcca

SEQ ID NO: 11310 - DNA, 20 bp, Artificial
  Synthetically generated peptide
cacgcacccactcagttgcc

SEQ ID NO: 11311 - DNA, 20 bp, Artificial
  Synthetically generated peptide
tcacgcacccactcagttgc

SEQ ID NO: 11312 - DNA, 20 bp, Artificial
  Synthetically generated peptide
ttcacgcacccactcagttg

SEQ ID NO: 11313 - DNA, 20 bp, Artificial
  Synthetically generated peptide
tttcacgcacccactcagtt

SEQ ID NO: 11314 - DNA, 20 bp, Artificial
  Synthetically generated peptide
ttttcacgcacccactcagt

SEQ ID NO: 11315 - DNA, 20 bp, Artificial
  Synthetically generated peptide
cttttcacgcacccactcag

SEQ ID NO: 11316 - DNA, 20 bp, Artificial
  Synthetically generated peptide
ccttttcacgcacccactca

SEQ ID NO: 11317 - DNA, 20 bp, Artificial
  Synthetically generated peptide
cccttttcacgcacccactc

SEQ ID NO: 11318 - DNA, 20 bp, Artificial
  Synthetically generated peptide
ccccttttcacgcacccact

SEQ ID NO: 11319 - DNA, 20 bp, Artificial
  Synthetically generated peptide
cccccttttcacgcacccac

SEQ ID NO: 11320 - DNA, 20 bp, Artificial
  Synthetically generated peptide
ccccccttttcacgcaccca

SEQ ID NO: 11321 - DNA, 20 bp, Artificial
  Synthetically generated peptide
tccccccttttcacgcaccc

SEQ ID NO: 11322 - DNA, 20 bp, Artificial
  Synthetically generated peptide
atccccccttttcacgcacc

SEQ ID NO: 11323 - DNA, 20 bp, Artificial
  Synthetically generated peptide
gatccccccttttcacgcac

SEQ ID NO: 11324 - DNA, 20 bp, Artificial
  Synthetically generated peptide
tgatccccccttttcacgca

SEQ ID NO: 11325 - DNA, 20 bp, Artificial
  Synthetically generated peptide
atgatccccccttttcacgc

SEQ ID NO: 11326 - DNA, 20 bp, Artificial
  Synthetically generated peptide
gatgatccccccttttcacg

SEQ ID NO: 11327 - DNA, 24 bp, Artificial
  Synthetically generated peptide
cggagacccacaacgcaacacacc

SEQ ID NO: 11328 - DNA, 20 bp, Artificial
  Synthetically generated peptide
ggagacccacaacgcaacac

SEQ ID NO: 11329 - DNA, 20 bp, Artificial
  Synthetically generated peptide
gagacccacaacgcaacaca

SEQ ID NO: 11330 - DNA, 20 bp, Artificial
  Synthetically generated peptide
agacccacaacgcaacacac

SEQ ID NO: 11331 - DNA, 20 bp, Artificial
  Synthetically generated peptide
gacccacaacgcaacacacc

SEQ ID NO: 11332 - DNA, 20 bp, Artificial
  Synthetically generated peptide
acccacaacgcaacacacct

SEQ ID NO: 11333 - DNA, 20 bp, Artificial
  Synthetically generated peptide
cccacaacgcaacacacctg

SEQ ID NO: 11334 - DNA, 20 bp, Artificial
  Synthetically generated peptide
ccacaacgcaacacacctga

SEQ ID NO: 11335 - DNA, 20 bp, Artificial
  Synthetically generated peptide
cacaacgcaacacacctgaa

SEQ ID NO: 11336 - DNA, 20 bp, Artificial
  Synthetically generated peptide
acaacgcaacacacctgaac

SEQ ID NO: 11337 - DNA, 20 bp, Artificial
  Synthetically generated peptide
caacgcaacacacctgaact

SEQ ID NO: 11338 - DNA, 20 bp, Artificial
  Synthetically generated peptide
aacgcaacacacctgaactg

SEQ ID NO: 11339 - DNA, 20 bp, Artificial
  Synthetically generated peptide
acgcaacacacctgaactgg

SEQ ID NO: 11340 - DNA, 20 bp, Artificial
  Synthetically generated peptide
cgcaacacacctgaactggg

SEQ ID NO: 11341 - DNA, 20 bp, Artificial
  Synthetically generated peptide
ccggagacccacaacgcaac

SEQ ID NO: 11342 - DNA, 20 bp, Artificial
  Synthetically generated peptide
gccggagacccacaacgcaa

SEQ ID NO: 11343 - DNA, 20 bp, Artificial
  Synthetically generated peptide
tgccggagacccacaacgca

SEQ ID NO: 11344 - DNA, 20 bp, Artificial
  Synthetically generated peptide
gtgccggagacccacaacgc

SEQ ID NO: 11345 - DNA, 20 bp, Artificial
  Synthetically generated peptide
tgtgccggagacccacaacg

SEQ ID NO: 11346 - DNA, 20 bp, Artificial
  Synthetically generated peptide
atgtgccggagacccacaac

SEQ ID NO: 11347 - DNA, 20 bp, Artificial
  Synthetically generated peptide
aatgtgccggagacccacaa

SEQ ID NO: 11348 - DNA, 20 bp, Artificial
  Synthetically generated peptide
aaatgtgccggagacccaca

SEQ ID NO: 11349 - DNA, 20 bp, Artificial
  Synthetically generated peptide
gaaatgtgccggagacccac

SEQ ID NO: 11350 - DNA, 20 bp, Artificial
  Synthetically generated peptide
tgaaatgtgccggagaccca

SEQ ID NO: 11351 - DNA, 20 bp, Artificial
  Synthetically generated peptide
ctgaaatgtgccggagaccc

SEQ ID NO: 11352 - DNA, 20 bp, Artificial
  Synthetically generated peptide
tctgaaatgtgccggagacc

SEQ ID NO: 11353 - DNA, 20 bp, Artificial
  Synthetically generated peptide
ctctgaaatgtgccggagac

SEQ ID NO: 11354 - DNA, 20 bp, Artificial
  Synthetically generated peptide
cctctgaaatgtgccggaga

SEQ ID NO: 11355 - DNA, 20 bp, Artificial
  Synthetically generated peptide
gcctctgaaatgtgccggag

SEQ ID NO: 11356 - DNA, 20 bp, Artificial
  Synthetically generated peptide
agcctctgaaatgtgccgga

SEQ ID NO: 11357 - DNA, 20 bp, Artificial
  Synthetically generated peptide
gagcctctgaaatgtgccgg

SEQ ID NO: 11358 - DNA, 20 bp, Artificial
  Synthetically generated peptide
tgagcctctgaaatgtgccg

SEQ ID NO: 11359 - DNA, 29 bp, Artificial
  Synthetically generated peptide
caacgccctggctcgagtgcagtggcacg

SEQ ID NO: 11360 - DNA, 20 bp, Artificial
  Synthetically generated peptide
aacgccctggctcgagtgca

SEQ ID NO: 11361 - DNA, 20 bp, Artificial
  Synthetically generated peptide
acgccctggctcgagtgcag

SEQ ID NO: 11362 - DNA, 20 bp, Artificial
  Synthetically generated peptide
cgccctggctcgagtgcagt

SEQ ID NO: 11363 - DNA, 20 bp, Artificial
  Synthetically generated peptide
gccctggctcgagtgcagtg

SEQ ID NO: 11364 - DNA, 20 bp, Artificial
  Synthetically generated peptide
ccctggctcgagtgcagtgg

SEQ ID NO: 11365 - DNA, 20 bp, Artificial
  Synthetically generated peptide
cctggctcgagtgcagtggc

SEQ ID NO: 11366 - DNA, 20 bp, Artificial
  Synthetically generated peptide
ctggctcgagtgcagtggca

SEQ ID NO: 11367 - DNA, 20 bp, Artificial
  Synthetically generated peptide
tggctcgagtgcagtggcac

SEQ ID NO: 11368 - DNA, 20 bp, Artificial
  Synthetically generated peptide
ggctcgagtgcagtggcacg

SEQ ID NO: 11369 - DNA, 20 bp, Artificial
  Synthetically generated peptide
gctcgagtgcagtggcacga

SEQ ID NO: 11370 - DNA, 20 bp, Artificial
  Synthetically generated peptide
ctcgagtgcagtggcacgat

SEQ ID NO: 11371 - DNA, 20 bp, Artificial
  Synthetically generated peptide
tcgagtgcagtggcacgatc

SEQ ID NO: 11372 - DNA, 20 bp, Artificial
  Synthetically generated peptide
cgagtgcagtggcacgatca

SEQ ID NO: 11373 - DNA, 20 bp, Artificial
  Synthetically generated peptide
gagtgcagtggcacgatcac

SEQ ID NO: 11374 - DNA, 20 bp, Artificial
  Synthetically generated peptide
agtgcagtggcacgatcaca

SEQ ID NO: 11375 - DNA, 20 bp, Artificial
  Synthetically generated peptide
gtgcagtggcacgatcacag

SEQ ID NO: 11376 - DNA, 20 bp, Artificial
  Synthetically generated peptide
tgcagtggcacgatcacagc

SEQ ID NO: 11377 - DNA, 20 bp, Artificial
  Synthetically generated peptide
gcagtggcacgatcacagct

SEQ ID NO: 11378 - DNA, 20 bp, Artificial
  Synthetically generated peptide
cagtggcacgatcacagctc

SEQ ID NO: 11379 - DNA, 20 bp, Artificial
  Synthetically generated peptide
agtggcacgatcacagctcg

SEQ ID NO: 11380 - DNA, 20 bp, Artificial
  Synthetically generated peptide
gtggcacgatcacagctcgc

SEQ ID NO: 11381 - DNA, 20 bp, Artificial
  Synthetically generated peptide
tggcacgatcacagctcgct

SEQ ID NO: 11382 - DNA, 20 bp, Artificial
  Synthetically generated peptide
ggcacgatcacagctcgctg

SEQ ID NO: 11383 - DNA, 20 bp, Artificial
  Synthetically generated peptide
gcacgatcacagctcgctgc

SEQ ID NO: 11384 - DNA, 20 bp, Artificial
  Synthetically generated peptide
cacgatcacagctcgctgca

SEQ ID NO: 11385 - DNA, 20 bp, Artificial
  Synthetically generated peptide
acgatcacagctcgctgcag

SEQ ID NO: 11386 - DNA, 20 bp, Artificial
  Synthetically generated peptide
cgatcacagctcgctgcagc

SEQ ID NO: 11387 - DNA, 20 bp, Artificial
  Synthetically generated peptide
gatcacagctcgctgcagcc

SEQ ID NO: 11388 - DNA, 20 bp, Artificial
  Synthetically generated peptide
atcacagctcgctgcagcct

SEQ ID NO: 11389 - DNA, 20 bp, Artificial
  Synthetically generated peptide
tcacagctcgctgcagcctt

SEQ ID NO: 11390 - DNA, 20 bp, Artificial
  Synthetically generated peptide
cacagctcgctgcagccttg

SEQ ID NO: 11391 - DNA, 20 bp, Artificial
  Synthetically generated peptide
acagctcgctgcagccttga

SEQ ID NO: 11392 - DNA, 20 bp, Artificial
  Synthetically generated peptide
cagctcgctgcagccttgac

SEQ ID NO: 11393 - DNA, 20 bp, Artificial
  Synthetically generated peptide
agctcgctgcagccttgacc

SEQ ID NO: 11394 - DNA, 20 bp, Artificial
  Synthetically generated peptide
gctcgctgcagccttgacct

SEQ ID NO: 11395 - DNA, 20 bp, Artificial
  Synthetically generated peptide
ctcgctgcagccttgacctc

SEQ ID NO: 11396 - DNA, 20 bp, Artificial
  Synthetically generated peptide
tcgctgcagccttgacctcc

SEQ ID NO: 11397 - DNA, 20 bp, Artificial
  Synthetically generated peptide
cgctgcagccttgacctccc

SEQ ID NO: 11398 - DNA, 20 bp, Artificial
  Synthetically generated peptide
gctgcagccttgacctcccg

SEQ ID NO: 11399 - DNA, 20 bp, Artificial
  Synthetically generated peptide
ctgcagccttgacctcccgg

SEQ ID NO: 11400 - DNA, 20 bp, Artificial
  Synthetically generated peptide
tgcagccttgacctcccggg

SEQ ID NO: 11401 - DNA, 20 bp, Artificial
  Synthetically generated peptide
gcagccttgacctcccgggc

SEQ ID NO: 11402 - DNA, 20 bp, Artificial
  Synthetically generated peptide
cagccttgacctcccgggct

SEQ ID NO: 11403 - DNA, 20 bp, Artificial
  Synthetically generated peptide
agccttgacctcccgggctc

SEQ ID NO: 11404 - DNA, 20 bp, Artificial
  Synthetically generated peptide
gccttgacctcccgggctca

SEQ ID NO: 11405 - DNA, 20 bp, Artificial
  Synthetically generated peptide
ccttgacctcccgggctcag

SEQ ID NO: 11406 - DNA, 20 bp, Artificial
  Synthetically generated peptide
cttgacctcccgggctcagg

SEQ ID NO: 11407 - DNA, 20 bp, Artificial
  Synthetically generated peptide
ttgacctcccgggctcaggt

SEQ ID NO: 11408 - DNA, 20 bp, Artificial
  Synthetically generated peptide
tgacctcccgggctcaggtc

SEQ ID NO: 11409 - DNA, 20 bp, Artificial
  Synthetically generated peptide
gacctcccgggctcaggtca

SEQ ID NO: 11410 - DNA, 20 bp, Artificial
  Synthetically generated peptide
acctcccgggctcaggtcat

SEQ ID NO: 11411 - DNA, 20 bp, Artificial
  Synthetically generated peptide
cctcccgggctcaggtcatc

SEQ ID NO: 11412 - DNA, 20 bp, Artificial
  Synthetically generated peptide
ctcccgggctcaggtcatcc

SEQ ID NO: 11413 - DNA, 20 bp, Artificial
  Synthetically generated peptide
tcccgggctcaggtcatcct

SEQ ID NO: 11414 - DNA, 20 bp, Artificial
  Synthetically generated peptide
cccgggctcaggtcatcctc

SEQ ID NO: 11415 - DNA, 20 bp, Artificial
  Synthetically generated peptide
ccgggctcaggtcatcctcc

SEQ ID NO: 11416 - DNA, 20 bp, Artificial
  Synthetically generated peptide
cgggctcaggtcatcctccc

SEQ ID NO: 11417 - DNA, 20 bp, Artificial
  Synthetically generated peptide
ccaacgccctggctcgagtg

SEQ ID NO: 11418 - DNA, 20 bp, Artificial
  Synthetically generated peptide
tccaacgccctggctcgagt

SEQ ID NO: 11419 - DNA, 20 bp, Artificial
  Synthetically generated peptide
ctccaacgccctggctcgag

SEQ ID NO: 11420 - DNA, 20 bp, Artificial
  Synthetically generated peptide
actccaacgccctggctcga

SEQ ID NO: 11421 - DNA, 20 bp, Artificial
  Synthetically generated peptide
cactccaacgccctggctcg

SEQ ID NO: 11422 - DNA, 20 bp, Artificial
  Synthetically generated peptide
tcactccaacgccctggctc

SEQ ID NO: 11423 - DNA, 20 bp, Artificial
  Synthetically generated peptide
ctcactccaacgccctggct

SEQ ID NO: 11424 - DNA, 20 bp, Artificial
  Synthetically generated peptide
tctcactccaacgccctggc

SEQ ID NO: 11425 - DNA, 20 bp, Artificial
  Synthetically generated peptide
gtctcactccaacgccctgg

SEQ ID NO: 11426 - DNA, 20 bp, Artificial
  Synthetically generated peptide
ggtctcactccaacgccctg

SEQ ID NO: 11427 - DNA, 20 bp, Artificial
  Synthetically generated peptide
gggtctcactccaacgccct

SEQ ID NO: 11428 - DNA, 20 bp, Artificial
  Synthetically generated peptide
agggtctcactccaacgccc

SEQ ID NO: 11429 - DNA, 20 bp, Artificial
  Synthetically generated peptide
cagggtctcactccaacgcc

SEQ ID NO: 11430 - DNA, 20 bp, Artificial
  Synthetically generated peptide
acagggtctcactccaacgc

SEQ ID NO: 11431 - DNA, 20 bp, Artificial
  Synthetically generated peptide
gacagggtctcactccaacg

SEQ ID NO: 11432 - DNA, 28 bp, Artificial
  Synthetically generated peptide
ctactatctcagatactcggccaactcg

SEQ ID NO: 11433 - DNA, 20 bp, Artificial
  Synthetically generated peptide
tactatctcagatactcggc

SEQ ID NO: 11434 - DNA, 20 bp, Artificial
  Synthetically generated peptide
actatctcagatactcggcc

SEQ ID NO: 11435 - DNA, 20 bp, Artificial
  Synthetically generated peptide
ctatctcagatactcggcca

SEQ ID NO: 11436 - DNA, 20 bp, Artificial
  Synthetically generated peptide
tatctcagatactcggccaa

SEQ ID NO: 11437 - DNA, 20 bp, Artificial
  Synthetically generated peptide
atctcagatactcggccaac

SEQ ID NO: 11438 - DNA, 20 bp, Artificial
  Synthetically generated peptide
tctcagatactcggccaact

SEQ ID NO: 11439 - DNA, 20 bp, Artificial
  Synthetically generated peptide
ctcagatactcggccaactc

SEQ ID NO: 11440 - DNA, 20 bp, Artificial
  Synthetically generated peptide
tcagatactcggccaactcg

SEQ ID NO: 11441 - DNA, 20 bp, Artificial
  Synthetically generated peptide
cagatactcggccaactcgt

SEQ ID NO: 11442 - DNA, 20 bp, Artificial
  Synthetically generated peptide
agatactcggccaactcgtt

SEQ ID NO: 11443 - DNA, 20 bp, Artificial
  Synthetically generated peptide
gatactcggccaactcgttt

SEQ ID NO: 11444 - DNA, 20 bp, Artificial
  Synthetically generated peptide
atactcggccaactcgtttg

SEQ ID NO: 11445 - DNA, 20 bp, Artificial
  Synthetically generated peptide
tactcggccaactcgtttgt

SEQ ID NO: 11446 - DNA, 20 bp, Artificial
  Synthetically generated peptide
actcggccaactcgtttgta

SEQ ID NO: 11447 - DNA, 20 bp, Artificial
  Synthetically generated peptide
ctcggccaactcgtttgtaa

SEQ ID NO: 11448 - DNA, 20 bp, Artificial
  Synthetically generated peptide
tcggccaactcgtttgtaaa

SEQ ID NO: 11449 - DNA, 20 bp, Artificial
  Synthetically generated peptide
cggccaactcgtttgtaaaa

SEQ ID NO: 11450 - DNA, 27 bp, Artificial
  Synthetically generated peptide
cacgcgtttcagcactgcaccctgttg

SEQ ID NO: 11451 - DNA, 20 bp, Artificial
  Synthetically generated peptide
acgcgtttcagcactgcacc

SEQ ID NO: 11452 - DNA, 20 bp, Artificial
  Synthetically generated peptide
cgcgtttcagcactgcaccc

SEQ ID NO: 11453 - DNA, 20 bp, Artificial
  Synthetically generated peptide
gcgtttcagcactgcaccct

SEQ ID NO: 11454 - DNA, 20 bp, Artificial
  Synthetically generated peptide
cgtttcagcactgcaccctg

SEQ ID NO: 11455 - DNA, 20 bp, Artificial
  Synthetically generated peptide
gcacgcgtttcagcactgca

SEQ ID NO: 11456 - DNA, 20 bp, Artificial
  Synthetically generated peptide
tgcacgcgtttcagcactgc

SEQ ID NO: 11457 - DNA, 20 bp, Artificial
  Synthetically generated peptide
gtgcacgcgtttcagcactg

SEQ ID NO: 11458 - DNA, 20 bp, Artificial
  Synthetically generated peptide
tgtgcacgcgtttcagcact

SEQ ID NO: 11459 - DNA, 20 bp, Artificial
  Synthetically generated peptide
ctgtgcacgcgtttcagcac

SEQ ID NO: 11460 - DNA, 20 bp, Artificial
  Synthetically generated peptide
actgtgcacgcgtttcagca

SEQ ID NO: 11461 - DNA, 20 bp, Artificial
  Synthetically generated peptide
tactgtgcacgcgtttcagc

SEQ ID NO: 11462 - DNA, 20 bp, Artificial
  Synthetically generated peptide
ctactgtgcacgcgtttcag

SEQ ID NO: 11463 - DNA, 20 bp, Artificial
  Synthetically generated peptide
tctactgtgcacgcgtttca

SEQ ID NO: 11464 - DNA, 20 bp, Artificial
  Synthetically generated peptide
atctactgtgcacgcgtttc

SEQ ID NO: 11465 - DNA, 20 bp, Artificial
  Synthetically generated peptide
aatctactgtgcacgcgttt

SEQ ID NO: 11466 - DNA, 20 bp, Artificial
  Synthetically generated peptide
aaatctactgtgcacgcgtt

SEQ ID NO: 11467 - DNA, 20 bp, Artificial
  Synthetically generated peptide
aaaatctactgtgcacgcgt

SEQ ID NO: 11468 - DNA, 20 bp, Artificial
  Synthetically generated peptide
caaaatctactgtgcacgcg

SEQ ID NO: 11469 - DNA, 20 bp, Artificial
  Synthetically generated peptide
gcaaaatctactgtgcacgc

SEQ ID NO: 11470 - DNA, 20 bp, Artificial
  Synthetically generated peptide
agcaaaatctactgtgcacg

SEQ ID NO: 11471 - DNA, 25 bp, Artificial
  Synthetically generated peptide
cgccggaggaggccgtttacactgc

SEQ ID NO: 11472 - DNA, 20 bp, Artificial
  Synthetically generated peptide
gccggaggaggccgtttaca

SEQ ID NO: 11473 - DNA, 20 bp, Artificial
  Synthetically generated peptide
ccggaggaggccgtttacac

SEQ ID NO: 11474 - DNA, 20 bp, Artificial
  Synthetically generated peptide
cggaggaggccgtttacact

SEQ ID NO: 11475 - DNA, 20 bp, Artificial
  Synthetically generated peptide
ggaggaggccgtttacactg

SEQ ID NO: 11476 - DNA, 20 bp, Artificial
  Synthetically generated peptide
gaggaggccgtttacactgc

SEQ ID NO: 11477 - DNA, 20 bp, Artificial
  Synthetically generated peptide
aggaggccgtttacactgct

SEQ ID NO: 11478 - DNA, 20 bp, Artificial
  Synthetically generated peptide
ggaggccgtttacactgctc

SEQ ID NO: 11479 - DNA, 20 bp, Artificial
  Synthetically generated peptide
gaggccgtttacactgctct

SEQ ID NO: 11480 - DNA, 20 bp, Artificial
  Synthetically generated peptide
aggccgtttacactgctctc

SEQ ID NO: 11481 - DNA, 20 bp, Artificial
  Synthetically generated peptide
ggccgtttacactgctctcc

SEQ ID NO: 11482 - DNA, 20 bp, Artificial
  Synthetically generated peptide
gccgtttacactgctctccg

SEQ ID NO: 11483 - DNA, 20 bp, Artificial
  Synthetically generated peptide
ccgtttacactgctctccgg

SEQ ID NO: 11484 - DNA, 20 bp, Artificial
  Synthetically generated peptide
cgtttacactgctctccggg

SEQ ID NO: 11485 - DNA, 20 bp, Artificial
  Synthetically generated peptide
gtttacactgctctccgggc

SEQ ID NO: 11486 - DNA, 20 bp, Artificial
  Synthetically generated peptide
tttacactgctctccgggcc

SEQ ID NO: 11487 - DNA, 20 bp, Artificial
  Synthetically generated peptide
ttacactgctctccgggccc

SEQ ID NO: 11488 - DNA, 20 bp, Artificial
  Synthetically generated peptide
tacactgctctccgggccca

SEQ ID NO: 11489 - DNA, 20 bp, Artificial
  Synthetically generated peptide
acactgctctccgggcccag

SEQ ID NO: 11490 - DNA, 20 bp, Artificial
  Synthetically generated peptide
cactgctctccgggcccagc

SEQ ID NO: 11491 - DNA, 20 bp, Artificial
  Synthetically generated peptide
actgctctccgggcccagcc

SEQ ID NO: 11492 - DNA, 20 bp, Artificial
  Synthetically generated peptide
ctgctctccgggcccagcct

SEQ ID NO: 11493 - DNA, 20 bp, Artificial
  Synthetically generated peptide
tgctctccgggcccagcctc

SEQ ID NO: 11494 - DNA, 20 bp, Artificial
  Synthetically generated peptide
gctctccgggcccagcctca

SEQ ID NO: 11495 - DNA, 20 bp, Artificial
  Synthetically generated peptide
ctctccgggcccagcctcac

SEQ ID NO: 11496 - DNA, 20 bp, Artificial
  Synthetically generated peptide
tctccgggcccagcctcacc

SEQ ID NO: 11497 - DNA, 20 bp, Artificial
  Synthetically generated peptide
ctccgggcccagcctcaccc

SEQ ID NO: 11498 - DNA, 20 bp, Artificial
  Synthetically generated peptide
tccgggcccagcctcaccct

SEQ ID NO: 11499 - DNA, 20 bp, Artificial
  Synthetically generated peptide
ccgggcccagcctcaccctt

SEQ ID NO: 11500 - DNA, 20 bp, Artificial
  Synthetically generated peptide
cgggcccagcctcacccttc

SEQ ID NO: 11501 - DNA, 20 bp, Artificial
  Synthetically generated peptide
gggcccagcctcacccttcg

SEQ ID NO: 11502 - DNA, 20 bp, Artificial
  Synthetically generated peptide
ggcccagcctcacccttcgc

SEQ ID NO: 11503 - DNA, 20 bp, Artificial
  Synthetically generated peptide
gcccagcctcacccttcgct

SEQ ID NO: 11504 - DNA, 20 bp, Artificial
  Synthetically generated peptide
cccagcctcacccttcgctc

SEQ ID NO: 11505 - DNA, 20 bp, Artificial
  Synthetically generated peptide
ccagcctcacccttcgctct

SEQ ID NO: 11506 - DNA, 20 bp, Artificial
  Synthetically generated peptide
cagcctcacccttcgctctc

SEQ ID NO: 11507 - DNA, 20 bp, Artificial
  Synthetically generated peptide
agcctcacccttcgctctcc

SEQ ID NO: 11508 - DNA, 20 bp, Artificial
  Synthetically generated peptide
gcctcacccttcgctctccc

SEQ ID NO: 11509 - DNA, 20 bp, Artificial
  Synthetically generated peptide
cctcacccttcgctctcccc

SEQ ID NO: 11510 - DNA, 20 bp, Artificial
  Synthetically generated peptide
ctcacccttcgctctccccg

SEQ ID NO: 11511 - DNA, 20 bp, Artificial
  Synthetically generated peptide
tcacccttcgctctccccga

SEQ ID NO: 11512 - DNA, 20 bp, Artificial
  Synthetically generated peptide
cacccttcgctctccccgag

SEQ ID NO: 11513 - DNA, 20 bp, Artificial
  Synthetically generated peptide
acccttcgctctccccgaga

SEQ ID NO: 11514 - DNA, 20 bp, Artificial
  Synthetically generated peptide
cccttcgctctccccgagat

SEQ ID NO: 11515 - DNA, 20 bp, Artificial
  Synthetically generated peptide
ccttcgctctccccgagatg

SEQ ID NO: 11516 - DNA, 20 bp, Artificial
  Synthetically generated peptide
cttcgctctccccgagatgg

SEQ ID NO: 11517 - DNA, 20 bp, Artificial
  Synthetically generated peptide
ttcgctctccccgagatggg

SEQ ID NO: 11518 - DNA, 20 bp, Artificial
  Synthetically generated peptide
tcgctctccccgagatggga

SEQ ID NO: 11519 - DNA, 20 bp, Artificial
  Synthetically generated peptide
cgctctccccgagatgggaa

SEQ ID NO: 11520 - DNA, 20 bp, Artificial
  Synthetically generated peptide
gctctccccgagatgggaag

SEQ ID NO: 11521 - DNA, 20 bp, Artificial
  Synthetically generated peptide
ctctccccgagatgggaaga

SEQ ID NO: 11522 - DNA, 20 bp, Artificial
  Synthetically generated peptide
tctccccgagatgggaagag

SEQ ID NO: 11523 - DNA, 20 bp, Artificial
  Synthetically generated peptide
ctccccgagatgggaagagg

SEQ ID NO: 11524 - DNA, 20 bp, Artificial
  Synthetically generated peptide
tccccgagatgggaagaggc

SEQ ID NO: 11525 - DNA, 20 bp, Artificial
  Synthetically generated peptide
ccccgagatgggaagaggct

SEQ ID NO: 11526 - DNA, 20 bp, Artificial
  Synthetically generated peptide
cccgagatgggaagaggctc

SEQ ID NO: 11527 - DNA, 20 bp, Artificial
  Synthetically generated peptide
ccgagatgggaagaggctct

SEQ ID NO: 11528 - DNA, 20 bp, Artificial
  Synthetically generated peptide
ccgccggaggaggccgttta

SEQ ID NO: 11529 - DNA, 20 bp, Artificial
  Synthetically generated peptide
cccgccggaggaggccgttt

SEQ ID NO: 11530 - DNA, 25 bp, Artificial
  Synthetically generated peptide
cgtgcgcgcaagtctcttgctttcc

SEQ ID NO: 11531 - DNA, 20 bp, Artificial
  Synthetically generated peptide
gtgcgcgcaagtctcttgct

SEQ ID NO: 11532 - DNA, 20 bp, Artificial
  Synthetically generated peptide
tgcgcgcaagtctcttgctt

SEQ ID NO: 11533 - DNA, 20 bp, Artificial
  Synthetically generated peptide
gcgcgcaagtctcttgcttt

SEQ ID NO: 11534 - DNA, 20 bp, Artificial
  Synthetically generated peptide
cgcgcaagtctcttgctttc

SEQ ID NO: 11535 - DNA, 20 bp, Artificial
  Synthetically generated peptide
gcgcaagtctcttgctttcc

SEQ ID NO: 11536 - DNA, 20 bp, Artificial
  Synthetically generated peptide
cgcaagtctcttgctttccc

SEQ ID NO: 11537 - DNA, 20 bp, Artificial
  Synthetically generated peptide
gcgtgcgcgcaagtctcttg

SEQ ID NO: 11538 - DNA, 20 bp, Artificial
  Synthetically generated peptide
tgcgtgcgcgcaagtctctt

SEQ ID NO: 11539 - DNA, 20 bp, Artificial
  Synthetically generated peptide
gtgcgtgcgcgcaagtctct

SEQ ID NO: 11540 - DNA, 20 bp, Artificial
  Synthetically generated peptide
tgtgcgtgcgcgcaagtctc

SEQ ID NO: 11541 - DNA, 20 bp, Artificial
  Synthetically generated peptide
ctgtgcgtgcgcgcaagtct

SEQ ID NO: 11542 - DNA, 20 bp, Artificial
  Synthetically generated peptide
actgtgcgtgcgcgcaagtc

SEQ ID NO: 11543 - DNA, 20 bp, Artificial
  Synthetically generated peptide
gactgtgcgtgcgcgcaagt

SEQ ID NO: 11544 - DNA, 20 bp, Artificial
  Synthetically generated peptide
ggactgtgcgtgcgcgcaag

SEQ ID NO: 11545 - DNA, 20 bp, Artificial
  Synthetically generated peptide
aggactgtgcgtgcgcgcaa

SEQ ID NO: 11546 - DNA, 20 bp, Artificial
  Synthetically generated peptide
gaggactgtgcgtgcgcgca

SEQ ID NO: 11547 - DNA, 20 bp, Artificial
  Synthetically generated peptide
agaggactgtgcgtgcgcgc

SEQ ID NO: 11548 - DNA, 20 bp, Artificial
  Synthetically generated peptide
cagaggactgtgcgtgcgcg

SEQ ID NO: 11549 - DNA, 20 bp, Artificial
  Synthetically generated peptide
ccagaggactgtgcgtgcgc

SEQ ID NO: 11550 - DNA, 20 bp, Artificial
  Synthetically generated peptide
tccagaggactgtgcgtgcg

SEQ ID NO: 11551 - DNA, 20 bp, Artificial
  Synthetically generated peptide
ctccagaggactgtgcgtgc

SEQ ID NO: 11552 - DNA, 20 bp, Artificial
  Synthetically generated peptide
tctccagaggactgtgcgtg

SEQ ID NO: 11553 - DNA, 20 bp, Artificial
  Synthetically generated peptide
atctccagaggactgtgcgt

SEQ ID NO: 11554 - DNA, 20 bp, Artificial
  Synthetically generated peptide
gatctccagaggactgtgcg

SEQ ID NO: 11555 - DNA, 25 bp, Artificial
  Synthetically generated peptide
cgctctccgcgccgagtgccgcgcc

SEQ ID NO: 11556 - DNA, 20 bp, Artificial
  Synthetically generated peptide
gctctccgcgccgagtgccg

SEQ ID NO: 11557 - DNA, 20 bp, Artificial
  Synthetically generated peptide
ctctccgcgccgagtgccgc

SEQ ID NO: 11558 - DNA, 20 bp, Artificial
  Synthetically generated peptide
tctccgcgccgagtgccgcg

SEQ ID NO: 11559 - DNA, 20 bp, Artificial
  Synthetically generated peptide
ctccgcgccgagtgccgcgc

SEQ ID NO: 11560 - DNA, 20 bp, Artificial
  Synthetically generated peptide
tccgcgccgagtgccgcgcc

SEQ ID NO: 11561 - DNA, 20 bp, Artificial
  Synthetically generated peptide
ccgcgccgagtgccgcgccc

SEQ ID NO: 11562 - DNA, 20 bp, Artificial
  Synthetically generated peptide
cgcgccgagtgccgcgcccc

SEQ ID NO: 11563 - DNA, 20 bp, Artificial
  Synthetically generated peptide
gcgccgagtgccgcgccccc

SEQ ID NO: 11564 - DNA, 20 bp, Artificial
  Synthetically generated peptide
cgccgagtgccgcgcccccg

SEQ ID NO: 11565 - DNA, 20 bp, Artificial
  Synthetically generated peptide
gccgagtgccgcgcccccgt

SEQ ID NO: 11566 - DNA, 20 bp, Artificial
  Synthetically generated peptide
ccgagtgccgcgcccccgtc

SEQ ID NO: 11567 - DNA, 20 bp, Artificial
  Synthetically generated peptide
cgagtgccgcgcccccgtct

SEQ ID NO: 11568 - DNA, 20 bp, Artificial
  Synthetically generated peptide
gagtgccgcgcccccgtctg

SEQ ID NO: 11569 - DNA, 20 bp, Artificial
  Synthetically generated peptide
agtgccgcgcccccgtctgt

SEQ ID NO: 11570 - DNA, 20 bp, Artificial
  Synthetically generated peptide
gtgccgcgcccccgtctgta

SEQ ID NO: 11571 - DNA, 20 bp, Artificial
  Synthetically generated peptide
tgccgcgcccccgtctgtag

SEQ ID NO: 11572 - DNA, 20 bp, Artificial
  Synthetically generated peptide
gccgcgcccccgtctgtagc

SEQ ID NO: 11573 - DNA, 20 bp, Artificial
  Synthetically generated peptide
ccgcgcccccgtctgtagct

SEQ ID NO: 11574 - DNA, 20 bp, Artificial
  Synthetically generated peptide
cgcgcccccgtctgtagctc

SEQ ID NO: 11575 - DNA, 20 bp, Artificial
  Synthetically generated peptide
gcgcccccgtctgtagctcg

SEQ ID NO: 11576 - DNA, 20 bp, Artificial
  Synthetically generated peptide
cgcccccgtctgtagctcgc

SEQ ID NO: 11577 - DNA, 20 bp, Artificial
  Synthetically generated peptide
gcccccgtctgtagctcgct

SEQ ID NO: 11578 - DNA, 20 bp, Artificial
  Synthetically generated peptide
cccccgtctgtagctcgctg

SEQ ID NO: 11579 - DNA, 20 bp, Artificial
  Synthetically generated peptide
ccccgtctgtagctcgctgc

SEQ ID NO: 11580 - DNA, 20 bp, Artificial
  Synthetically generated peptide
cccgtctgtagctcgctgcg

SEQ ID NO: 11581 - DNA, 20 bp, Artificial
  Synthetically generated peptide
ccgtctgtagctcgctgcgc

SEQ ID NO: 11582 - DNA, 20 bp, Artificial
  Synthetically generated peptide
cgtctgtagctcgctgcgct

SEQ ID NO: 11583 - DNA, 20 bp, Artificial
  Synthetically generated peptide
gtctgtagctcgctgcgctc

SEQ ID NO: 11584 - DNA, 20 bp, Artificial
  Synthetically generated peptide
tctgtagctcgctgcgctcg

SEQ ID NO: 11585 - DNA, 20 bp, Artificial
  Synthetically generated peptide
ctgtagctcgctgcgctcgg

SEQ ID NO: 11586 - DNA, 20 bp, Artificial
  Synthetically generated peptide
tgtagctcgctgcgctcggt

SEQ ID NO: 11587 - DNA, 20 bp, Artificial
  Synthetically generated peptide
gtagctcgctgcgctcggta

SEQ ID NO: 11588 - DNA, 20 bp, Artificial
  Synthetically generated peptide
tagctcgctgcgctcggtac

SEQ ID NO: 11589 - DNA, 20 bp, Artificial
  Synthetically generated peptide
agctcgctgcgctcggtaca

SEQ ID NO: 11590 - DNA, 20 bp, Artificial
  Synthetically generated peptide
gctcgctgcgctcggtacag

SEQ ID NO: 11591 - DNA, 20 bp, Artificial
  Synthetically generated peptide
ctcgctgcgctcggtacaga

SEQ ID NO: 11592 - DNA, 20 bp, Artificial
  Synthetically generated peptide
tcgctgcgctcggtacagag

SEQ ID NO: 11593 - DNA, 20 bp, Artificial
  Synthetically generated peptide
cgctgcgctcggtacagagg

SEQ ID NO: 11594 - DNA, 20 bp, Artificial
  Synthetically generated peptide
gctgcgctcggtacagagga

SEQ ID NO: 11595 - DNA, 20 bp, Artificial
  Synthetically generated peptide
ctgcgctcggtacagaggaa

SEQ ID NO: 11596 - DNA, 20 bp, Artificial
  Synthetically generated peptide
tgcgctcggtacagaggaac

SEQ ID NO: 11597 - DNA, 20 bp, Artificial
  Synthetically generated peptide
gcgctcggtacagaggaact

SEQ ID NO: 11598 - DNA, 20 bp, Artificial
  Synthetically generated peptide
cgctcggtacagaggaacta

SEQ ID NO: 11599 - DNA, 20 bp, Artificial
  Synthetically generated peptide
gctcggtacagaggaactac

SEQ ID NO: 11600 - DNA, 20 bp, Artificial
  Synthetically generated peptide
ctcggtacagaggaactact

SEQ ID NO: 11601 - DNA, 20 bp, Artificial
  Synthetically generated peptide
tcggtacagaggaactacta

SEQ ID NO: 11602 - DNA, 20 bp, Artificial
  Synthetically generated peptide
cggtacagaggaactactat

SEQ ID NO: 11603 - DNA, 20 bp, Artificial
  Synthetically generated peptide
ccgctctccgcgccgagtgc

SEQ ID NO: 11604 - DNA, 20 bp, Artificial
  Synthetically generated peptide
cccgctctccgcgccgagtg

SEQ ID NO: 11605 - DNA, 20 bp, Artificial
  Synthetically generated peptide
tcccgctctccgcgccgagt

SEQ ID NO: 11606 - DNA, 20 bp, Artificial
  Synthetically generated peptide
ctcccgctctccgcgccgag

SEQ ID NO: 11607 - DNA, 20 bp, Artificial
  Synthetically generated peptide
cctcccgctctccgcgccga

SEQ ID NO: 11608 - DNA, 20 bp, Artificial
  Synthetically generated peptide
gcctcccgctctccgcgccg

SEQ ID NO: 11609 - DNA, 20 bp, Artificial
  Synthetically generated peptide
agcctcccgctctccgcgcc

SEQ ID NO: 11610 - DNA, 20 bp, Artificial
  Synthetically generated peptide
gagcctcccgctctccgcgc

SEQ ID NO: 11611 - DNA, 20 bp, Artificial
  Synthetically generated peptide
tgagcctcccgctctccgcg

SEQ ID NO: 11612 - DNA, 20 bp, Artificial
  Synthetically generated peptide
ttgagcctcccgctctccgc

SEQ ID NO: 11613 - DNA, 20 bp, Artificial
  Synthetically generated peptide
cttgagcctcccgctctccg

SEQ ID NO: 11614 - DNA, 20 bp, Artificial
  Synthetically generated peptide
ccttgagcctcccgctctcc

SEQ ID NO: 11615 - DNA, 20 bp, Artificial
  Synthetically generated peptide
accttgagcctcccgctctc

SEQ ID NO: 11616 - DNA, 20 bp, Artificial
  Synthetically generated peptide
gaccttgagcctcccgctct

SEQ ID NO: 11617 - DNA, 20 bp, Artificial
  Synthetically generated peptide
ggaccttgagcctcccgctc

SEQ ID NO: 11618 - DNA, 20 bp, Artificial
  Synthetically generated peptide
gggaccttgagcctcccgct

SEQ ID NO: 11619 - DNA, 20 bp, Artificial
  Synthetically generated peptide
tgggaccttgagcctcccgc

SEQ ID NO: 11620 - DNA, 20 bp, Artificial
  Synthetically generated peptide
ctgggaccttgagcctcccg

SEQ ID NO: 11621 - DNA, 25 bp, Artificial
  Synthetically generated peptide
cgccttttgcgttccttttggctcc

SEQ ID NO: 11622 - DNA, 20 bp, Artificial
  Synthetically generated peptide
gccttttgcgttccttttgg

SEQ ID NO: 11623 - DNA, 20 bp, Artificial
  Synthetically generated peptide
ccttttgcgttccttttggc

SEQ ID NO: 11624 - DNA, 20 bp, Artificial
  Synthetically generated peptide
cttttgcgttccttttggct

SEQ ID NO: 11625 - DNA, 20 bp, Artificial
  Synthetically generated peptide
ttttgcgttccttttggctc

SEQ ID NO: 11626 - DNA, 20 bp, Artificial
  Synthetically generated peptide
tttgcgttccttttggctcc

SEQ ID NO: 11627 - DNA, 20 bp, Artificial
  Synthetically generated peptide
ttgcgttccttttggctcct

SEQ ID NO: 11628 - DNA, 20 bp, Artificial
  Synthetically generated peptide
tgcgttccttttggctcctc

SEQ ID NO: 11629 - DNA, 20 bp, Artificial
  Synthetically generated peptide
gcgttccttttggctcctcc

SEQ ID NO: 11630 - DNA, 20 bp, Artificial
  Synthetically generated peptide
cgttccttttggctcctcca

SEQ ID NO: 11631 - DNA, 20 bp, Artificial
  Synthetically generated peptide
ccgccttttgcgttcctttt

SEQ ID NO: 11632 - DNA, 20 bp, Artificial
  Synthetically generated peptide
gccgccttttgcgttccttt

SEQ ID NO: 11633 - DNA, 20 bp, Artificial
  Synthetically generated peptide
ggccgccttttgcgttcctt

SEQ ID NO: 11634 - DNA, 20 bp, Artificial
  Synthetically generated peptide
tggccgccttttgcgttcct

SEQ ID NO: 11635 - DNA, 20 bp, Artificial
  Synthetically generated peptide
ctggccgccttttgcgttcc

SEQ ID NO: 11636 - DNA, 20 bp, Artificial
  Synthetically generated peptide
cctggccgccttttgcgttc

SEQ ID NO: 11637 - DNA, 20 bp, Artificial
  Synthetically generated peptide
tcctggccgccttttgcgtt

SEQ ID NO: 11638 - DNA, 20 bp, Artificial
  Synthetically generated peptide
gtcctggccgccttttgcgt

SEQ ID NO: 11639 - DNA, 20 bp, Artificial
  Synthetically generated peptide
tgtcctggccgccttttgcg

SEQ ID NO: 11640 - DNA, 20 bp, Artificial
  Synthetically generated peptide
ctgtcctggccgccttttgc

SEQ ID NO: 11641 - DNA, 20 bp, Artificial
  Synthetically generated peptide
gctgtcctggccgccttttg

SEQ ID NO: 11642 - DNA, 20 bp, Artificial
  Synthetically generated peptide
cgctgtcctggccgcctttt

SEQ ID NO: 11643 - DNA, 20 bp, Artificial
  Synthetically generated peptide
acgctgtcctggccgccttt

SEQ ID NO: 11644 - DNA, 20 bp, Artificial
  Synthetically generated peptide
cacgctgtcctggccgcctt

SEQ ID NO: 11645 - DNA, 20 bp, Artificial
  Synthetically generated peptide
gcacgctgtcctggccgcct

SEQ ID NO: 11646 - DNA, 20 bp, Artificial
  Synthetically generated peptide
tgcacgctgtcctggccgcc

SEQ ID NO: 11647 - DNA, 20 bp, Artificial
  Synthetically generated peptide
ctgcacgctgtcctggccgc

SEQ ID NO: 11648 - DNA, 20 bp, Artificial
  Synthetically generated peptide
gctgcacgctgtcctggccg

SEQ ID NO: 11649 - DNA, 20 bp, Artificial
  Synthetically generated peptide
tgctgcacgctgtcctggcc

SEQ ID NO: 11650 - DNA, 20 bp, Artificial
  Synthetically generated peptide
ctgctgcacgctgtcctggc

SEQ ID NO: 11651 - DNA, 20 bp, Artificial
  Synthetically generated peptide
gctgctgcacgctgtcctgg

SEQ ID NO: 11652 - DNA, 20 bp, Artificial
  Synthetically generated peptide
agctgctgcacgctgtcctg

SEQ ID NO: 11653 - DNA, 20 bp, Artificial
  Synthetically generated peptide
cagctgctgcacgctgtcct

SEQ ID NO: 11654 - DNA, 20 bp, Artificial
  Synthetically generated peptide
ccagctgctgcacgctgtcc

SEQ ID NO: 11655 - DNA, 20 bp, Artificial
  Synthetically generated peptide
cccagctgctgcacgctgtc

SEQ ID NO: 11656 - DNA, 20 bp, Artificial
  Synthetically generated peptide
tcccagctgctgcacgctgt

SEQ ID NO: 11657 - DNA, 20 bp, Artificial
  Synthetically generated peptide
ctcccagctgctgcacgctg

SEQ ID NO: 11658 - DNA, 20 bp, Artificial
  Synthetically generated peptide
gctcccagctgctgcacgct

SEQ ID NO: 11659 - DNA, 20 bp, Artificial
  Synthetically generated peptide
ggctcccagctgctgcacgc

SEQ ID NO: 11660 - DNA, 20 bp, Artificial
  Synthetically generated peptide
cggctcccagctgctgcacg

SEQ ID NO: 11661 - DNA, 20 bp, Artificial
  Synthetically generated peptide
gcggctcccagctgctgcac

SEQ ID NO: 11662 - DNA, 20 bp, Artificial
  Synthetically generated peptide
ggcggctcccagctgctgca

SEQ ID NO: 11663 - DNA, 20 bp, Artificial
  Synthetically generated peptide
cggcggctcccagctgctgc

SEQ ID NO: 11664 - DNA, 20 bp, Artificial
  Synthetically generated peptide
acggcggctcccagctgctg

SEQ ID NO: 11665 - DNA, 20 bp, Artificial
  Synthetically generated peptide
aacggcggctcccagctgct

SEQ ID NO: 11666 - DNA, 20 bp, Artificial
  Synthetically generated peptide
gaacggcggctcccagctgc

SEQ ID NO: 11667 - DNA, 20 bp, Artificial
  Synthetically generated peptide
agaacggcggctcccagctg

SEQ ID NO: 11668 - DNA, 20 bp, Artificial
  Synthetically generated peptide
gagaacggcggctcccagct

SEQ ID NO: 11669 - DNA, 20 bp, Artificial
  Synthetically generated peptide
tgagaacggcggctcccagc

SEQ ID NO: 11670 - DNA, 20 bp, Artificial
  Synthetically generated peptide
ctgagaacggcggctcccag

SEQ ID NO: 11671 - DNA, 20 bp, Artificial
  Synthetically generated peptide
gctgagaacggcggctccca

SEQ ID NO: 11672 - DNA, 20 bp, Artificial
  Synthetically generated peptide
ggctgagaacggcggctccc

SEQ ID NO: 11673 - DNA, 20 bp, Artificial
  Synthetically generated peptide
aggctgagaacggcggctcc

SEQ ID NO: 11674 - DNA, 20 bp, Artificial
  Synthetically generated peptide
aaggctgagaacggcggctc

SEQ ID NO: 11675 - DNA, 20 bp, Artificial
  Synthetically generated peptide
taaggctgagaacggcggct

SEQ ID NO: 11676 - DNA, 20 bp, Artificial
  Synthetically generated peptide
ttaaggctgagaacggcggc

SEQ ID NO: 11677 - DNA, 20 bp, Artificial
  Synthetically generated peptide
tttaaggctgagaacggcgg

SEQ ID NO: 11678 - DNA, 20 bp, Artificial
  Synthetically generated peptide
ttttaaggctgagaacggcg

SEQ ID NO: 11679 - DNA, 20 bp, Artificial
  Synthetically generated peptide
cttttaaggctgagaacggc

SEQ ID NO: 11680 - DNA, 20 bp, Artificial
  Synthetically generated peptide
acttttaaggctgagaacgg

SEQ ID NO: 11681 - DNA, 25 bp, Artificial
  Synthetically generated peptide
cgcaggcactggagcggccccggcg

SEQ ID NO: 11682 - DNA, 20 bp, Artificial
  Synthetically generated peptide
gcaggcactggagcggcccc

SEQ ID NO: 11683 - DNA, 20 bp, Artificial
  Synthetically generated peptide
caggcactggagcggccccg

SEQ ID NO: 11684 - DNA, 20 bp, Artificial
  Synthetically generated peptide
aggcactggagcggccccgg

SEQ ID NO: 11685 - DNA, 20 bp, Artificial
  Synthetically generated peptide
ggcactggagcggccccggc

SEQ ID NO: 11686 - DNA, 20 bp, Artificial
  Synthetically generated peptide
gcactggagcggccccggcg

SEQ ID NO: 11687 - DNA, 20 bp, Artificial
  Synthetically generated peptide
cactggagcggccccggcgg

SEQ ID NO: 11688 - DNA, 20 bp, Artificial
  Synthetically generated peptide
actggagcggccccggcggc

SEQ ID NO: 11689 - DNA, 20 bp, Artificial
  Synthetically generated peptide
ctggagcggccccggcggca

SEQ ID NO: 11690 - DNA, 20 bp, Artificial
  Synthetically generated peptide
tggagcggccccggcggcag

SEQ ID NO: 11691 - DNA, 20 bp, Artificial
  Synthetically generated peptide
ggagcggccccggcggcagc

SEQ ID NO: 11692 - DNA, 20 bp, Artificial
  Synthetically generated peptide
gagcggccccggcggcagca

SEQ ID NO: 11693 - DNA, 20 bp, Artificial
  Synthetically generated peptide
agcggccccggcggcagcag

SEQ ID NO: 11694 - DNA, 20 bp, Artificial
  Synthetically generated peptide
gcggccccggcggcagcagc

SEQ ID NO: 11695 - DNA, 20 bp, Artificial
  Synthetically generated peptide
cggccccggcggcagcagct

SEQ ID NO: 11696 - DNA, 20 bp, Artificial
  Synthetically generated peptide
ggccccggcggcagcagctg

SEQ ID NO: 11697 - DNA, 20 bp, Artificial
  Synthetically generated peptide
gccccggcggcagcagctga

SEQ ID NO: 11698 - DNA, 20 bp, Artificial
  Synthetically generated peptide
ccccggcggcagcagctgag

SEQ ID NO: 11699 - DNA, 20 bp, Artificial
  Synthetically generated peptide
cccggcggcagcagctgagg

SEQ ID NO: 11700 - DNA, 20 bp, Artificial
  Synthetically generated peptide
ccggcggcagcagctgaggg

SEQ ID NO: 11701 - DNA, 20 bp, Artificial
  Synthetically generated peptide
cggcggcagcagctgagggc

SEQ ID NO: 11702 - DNA, 20 bp, Artificial
  Synthetically generated peptide
tcgcaggcactggagcggcc

SEQ ID NO: 11703 - DNA, 20 bp, Artificial
  Synthetically generated peptide
ttcgcaggcactggagcggc

SEQ ID NO: 11704 - DNA, 20 bp, Artificial
  Synthetically generated peptide
gttcgcaggcactggagcgg

SEQ ID NO: 11705 - DNA, 20 bp, Artificial
  Synthetically generated peptide
agttcgcaggcactggagcg

SEQ ID NO: 11706 - DNA, 20 bp, Artificial
  Synthetically generated peptide
gagttcgcaggcactggagc

SEQ ID NO: 11707 - DNA, 20 bp, Artificial
  Synthetically generated peptide
agagttcgcaggcactggag

SEQ ID NO: 11708 - DNA, 20 bp, Artificial
  Synthetically generated peptide
cagagttcgcaggcactgga

SEQ ID NO: 11709 - DNA, 20 bp, Artificial
  Synthetically generated peptide
tcagagttcgcaggcactgg

SEQ ID NO: 11710 - DNA, 20 bp, Artificial
  Synthetically generated peptide
ctcagagttcgcaggcactg

SEQ ID NO: 11711 - DNA, 20 bp, Artificial
  Synthetically generated peptide
cctcagagttcgcaggcact

SEQ ID NO: 11712 - DNA, 20 bp, Artificial
  Synthetically generated peptide
tcctcagagttcgcaggcac

SEQ ID NO: 11713 - DNA, 20 bp, Artificial
  Synthetically generated peptide
ctcctcagagttcgcaggca

SEQ ID NO: 11714 - DNA, 20 bp, Artificial
  Synthetically generated peptide
gctcctcagagttcgcaggc

SEQ ID NO: 11715 - DNA, 20 bp, Artificial
  Synthetically generated peptide
ggctcctcagagttcgcagg

SEQ ID NO: 11716 - DNA, 20 bp, Artificial
  Synthetically generated peptide
cggctcctcagagttcgcag

SEQ ID NO: 11717 - DNA, 20 bp, Artificial
  Synthetically generated peptide
tcggctcctcagagttcgca

SEQ ID NO: 11718 - DNA, 20 bp, Artificial
  Synthetically generated peptide
ctcggctcctcagagttcgc

SEQ ID NO: 11719 - DNA, 20 bp, Artificial
  Synthetically generated peptide
cctcggctcctcagagttcg

SEQ ID NO: 11720 - DNA, 20 bp, Artificial
  Synthetically generated peptide
gcctcggctcctcagagttc

SEQ ID NO: 11721 - DNA, 20 bp, Artificial
  Synthetically generated peptide
cgcctcggctcctcagagtt

SEQ ID NO: 11722 - DNA, 20 bp, Artificial
  Synthetically generated peptide
gcgcctcggctcctcagagt

SEQ ID NO: 11723 - DNA, 20 bp, Artificial
  Synthetically generated peptide
ggcgcctcggctcctcagag

SEQ ID NO: 11724 - DNA, 20 bp, Artificial
  Synthetically generated peptide
cggcgcctcggctcctcaga

SEQ ID NO: 11725 - DNA, 20 bp, Artificial
  Synthetically generated peptide
ccggcgcctcggctcctcag

SEQ ID NO: 11726 - DNA, 20 bp, Artificial
  Synthetically generated peptide
accggcgcctcggctcctca

SEQ ID NO: 11727 - DNA, 20 bp, Artificial
  Synthetically generated peptide
caccggcgcctcggctcctc

SEQ ID NO: 11728 - DNA, 20 bp, Artificial
  Synthetically generated peptide
tcaccggcgcctcggctcct

SEQ ID NO: 11729 - DNA, 20 bp, Artificial
  Synthetically generated peptide
ctcaccggcgcctcggctcc

SEQ ID NO: 11730 - DNA, 20 bp, Artificial
  Synthetically generated peptide
tctcaccggcgcctcggctc

SEQ ID NO: 11731 - DNA, 20 bp, Artificial
  Synthetically generated peptide
ctctcaccggcgcctcggct

SEQ ID NO: 11732 - DNA, 20 bp, Artificial
  Synthetically generated peptide
gctctcaccggcgcctcggc

SEQ ID NO: 11733 - DNA, 20 bp, Artificial
  Synthetically generated peptide
tgctctcaccggcgcctcgg

SEQ ID NO: 11734 - DNA, 20 bp, Artificial
  Synthetically generated peptide
ttgctctcaccggcgcctcg

SEQ ID NO: 11735 - DNA, 20 bp, Artificial
  Synthetically generated peptide
cttgctctcaccggcgcctc

SEQ ID NO: 11736 - DNA, 20 bp, Artificial
  Synthetically generated peptide
ccttgctctcaccggcgcct

SEQ ID NO: 11737 - DNA, 20 bp, Artificial
  Synthetically generated peptide
tccttgctctcaccggcgcc

SEQ ID NO: 11738 - DNA, 20 bp, Artificial
  Synthetically generated peptide
gtccttgctctcaccggcgc

SEQ ID NO: 11739 - DNA, 20 bp, Artificial
  Synthetically generated peptide
cgtccttgctctcaccggcg

SEQ ID NO: 11740 - DNA, 20 bp, Artificial
  Synthetically generated peptide
gcgtccttgctctcaccggc

SEQ ID NO: 11741 - DNA, 20 bp, Artificial
  Synthetically generated peptide
agcgtccttgctctcaccgg

SEQ ID NO: 11742 - DNA, 20 bp, Artificial
  Synthetically generated peptide
cagcgtccttgctctcaccg

SEQ ID NO: 11743 - DNA, 20 bp, Artificial
  Synthetically generated peptide
gcagcgtccttgctctcacc

SEQ ID NO: 11744 - DNA, 20 bp, Artificial
  Synthetically generated peptide
tgcagcgtccttgctctcac

SEQ ID NO: 11745 - DNA, 20 bp, Artificial
  Synthetically generated peptide
ttgcagcgtccttgctctca

SEQ ID NO: 11746 - DNA, 20 bp, Artificial
  Synthetically generated peptide
tttgcagcgtccttgctctc

SEQ ID NO: 11747 - DNA, 20 bp, Artificial
  Synthetically generated peptide
gtttgcagcgtccttgctct

SEQ ID NO: 11748 - DNA, 20 bp, Artificial
  Synthetically generated peptide
agtttgcagcgtccttgctc

SEQ ID NO: 11749 - DNA, 20 bp, Artificial
  Synthetically generated peptide
aagtttgcagcgtccttgct

SEQ ID NO: 11750 - DNA, 20 bp, Artificial
  Synthetically generated peptide
caagtttgcagcgtccttgc

SEQ ID NO: 11751 - DNA, 20 bp, Artificial
  Synthetically generated peptide
gcaagtttgcagcgtccttg

SEQ ID NO: 11752 - DNA, 20 bp, Artificial
  Synthetically generated peptide
cgcaagtttgcagcgtcctt

SEQ ID NO: 11753 - DNA, 20 bp, Artificial
  Synthetically generated peptide
gcgcaagtttgcagcgtcct

SEQ ID NO: 11754 - DNA, 20 bp, Artificial
  Synthetically generated peptide
tgcgcaagtttgcagcgtcc

SEQ ID NO: 11755 - DNA, 20 bp, Artificial
  Synthetically generated peptide
ctgcgcaagtttgcagcgtc

SEQ ID NO: 11756 - DNA, 20 bp, Artificial
  Synthetically generated peptide
gctgcgcaagtttgcagcgt

SEQ ID NO: 11757 - DNA, 20 bp, Artificial
  Synthetically generated peptide
cgctgcgcaagtttgcagcg

SEQ ID NO: 11758 - DNA, 20 bp, Artificial
  Synthetically generated peptide
gcgctgcgcaagtttgcagc

SEQ ID NO: 11759 - DNA, 20 bp, Artificial
  Synthetically generated peptide
cgcgctgcgcaagtttgcag

SEQ ID NO: 11760 - DNA, 20 bp, Artificial
  Synthetically generated peptide
ccgcgctgcgcaagtttgca

SEQ ID NO: 11761 - DNA, 20 bp, Artificial
  Synthetically generated peptide
cccgcgctgcgcaagtttgc

SEQ ID NO: 11762 - DNA, 20 bp, Artificial
  Synthetically generated peptide
ccccgcgctgcgcaagtttg

SEQ ID NO: 11763 - DNA, 20 bp, Artificial
  Synthetically generated peptide
cccccgcgctgcgcaagttt

SEQ ID NO: 11764 - DNA, 20 bp, Artificial
  Synthetically generated peptide
gcccccgcgctgcgcaagtt

SEQ ID NO: 11765 - DNA, 20 bp, Artificial
  Synthetically generated peptide
agcccccgcgctgcgcaagt

SEQ ID NO: 11766 - DNA, 20 bp, Artificial
  Synthetically generated peptide
cagcccccgcgctgcgcaag

SEQ ID NO: 11767 - DNA, 20 bp, Artificial
  Synthetically generated peptide
ccagcccccgcgctgcgcaa

SEQ ID NO: 11768 - DNA, 20 bp, Artificial
  Synthetically generated peptide
cccagcccccgcgctgcgca

SEQ ID NO: 11769 - DNA, 20 bp, Artificial
  Synthetically generated peptide
tcccagcccccgcgctgcgc

SEQ ID NO: 11770 - DNA, 20 bp, Artificial
  Synthetically generated peptide
atcccagcccccgcgctgcg

SEQ ID NO: 11771 - DNA, 20 bp, Artificial
  Synthetically generated peptide
aatcccagcccccgcgctgc

SEQ ID NO: 11772 - DNA, 20 bp, Artificial
  Synthetically generated peptide
gaatcccagcccccgcgctg

SEQ ID NO: 11773 - DNA, 20 bp, Artificial
  Synthetically generated peptide
tgaatcccagcccccgcgct

SEQ ID NO: 11774 - DNA, 20 bp, Artificial
  Synthetically generated peptide
gtgaatcccagcccccgcgc

SEQ ID NO: 11775 - DNA, 20 bp, Artificial
  Synthetically generated peptide
cgtgaatcccagcccccgcg

SEQ ID NO: 11776 - DNA, 20 bp, Artificial
  Synthetically generated peptide
gcgtgaatcccagcccccgc

SEQ ID NO: 11777 - DNA, 20 bp, Artificial
  Synthetically generated peptide
ggcgtgaatcccagcccccg

SEQ ID NO: 11778 - DNA, 20 bp, Artificial
  Synthetically generated peptide
gggcgtgaatcccagccccc

SEQ ID NO: 11779 - DNA, 20 bp, Artificial
  Synthetically generated peptide
tgggcgtgaatcccagcccc

SEQ ID NO: 11780 - DNA, 20 bp, Artificial
  Synthetically generated peptide
ctgggcgtgaatcccagccc

SEQ ID NO: 11781 - DNA, 20 bp, Artificial
  Synthetically generated peptide
tctgggcgtgaatcccagcc

SEQ ID NO: 11782 - DNA, 20 bp, Artificial
  Synthetically generated peptide
ttctgggcgtgaatcccagc

SEQ ID NO: 11783 - DNA, 20 bp, Artificial
  Synthetically generated peptide
cttctgggcgtgaatcccag

SEQ ID NO: 11784 - DNA, 20 bp, Artificial
  Synthetically generated peptide
acttctgggcgtgaatccca

SEQ ID NO: 11785 - DNA, 20 bp, Artificial
  Synthetically generated peptide
aacttctgggcgtgaatccc

SEQ ID NO: 11786 - DNA, 20 bp, Artificial
  Synthetically generated peptide
gaacttctgggcgtgaatcc

SEQ ID NO: 11787 - DNA, 20 bp, Artificial
  Synthetically generated peptide
tgaacttctgggcgtgaatc

SEQ ID NO: 11788 - DNA, 20 bp, Artificial
  Synthetically generated peptide
ctgaacttctgggcgtgaat

SEQ ID NO: 11789 - DNA, 20 bp, Artificial
  Synthetically generated peptide
gctgaacttctgggcgtgaa

SEQ ID NO: 11790 - DNA, 20 bp, Artificial
  Synthetically generated peptide
tgctgaacttctgggcgtga

SEQ ID NO: 11791 - DNA, 20 bp, Artificial
  Synthetically generated peptide
ctgctgaacttctgggcgtg

SEQ ID NO: 11792 - DNA, 20 bp, Artificial
  Synthetically generated peptide
cctgctgaacttctgggcgt

SEQ ID NO: 11793 - DNA, 20 bp, Artificial
  Synthetically generated peptide
gcctgctgaacttctgggcg

SEQ ID NO: 11794 - DNA, 25 bp, Artificial
  Synthetically generated peptide
cgaccctccgaacagaggcggcggg

SEQ ID NO: 11795 - DNA, 20 bp, Artificial
  Synthetically generated peptide
gaccctccgaacagaggcgg

SEQ ID NO: 11796 - DNA, 20 bp, Artificial
  Synthetically generated peptide
accctccgaacagaggcggc

SEQ ID NO: 11797 - DNA, 20 bp, Artificial
  Synthetically generated peptide
ccctccgaacagaggcggcg

SEQ ID NO: 11798 - DNA, 20 bp, Artificial
  Synthetically generated peptide
cctccgaacagaggcggcgg

SEQ ID NO: 11799 - DNA, 20 bp, Artificial
  Synthetically generated peptide
ctccgaacagaggcggcggg

SEQ ID NO: 11800 - DNA, 20 bp, Artificial
  Synthetically generated peptide
gcgaccctccgaacagaggc

SEQ ID NO: 11801 - DNA, 20 bp, Artificial
  Synthetically generated peptide
cgcgaccctccgaacagagg

SEQ ID NO: 11802 - DNA, 20 bp, Artificial
  Synthetically generated peptide
ccgcgaccctccgaacagag

SEQ ID NO: 11803 - DNA, 20 bp, Artificial
  Synthetically generated peptide
cccgcgaccctccgaacaga

SEQ ID NO: 11804 - DNA, 20 bp, Artificial
  Synthetically generated peptide
ccccgcgaccctccgaacag

SEQ ID NO: 11805 - DNA, 20 bp, Artificial
  Synthetically generated peptide
gccccgcgaccctccgaaca

SEQ ID NO: 11806 - DNA, 20 bp, Artificial
  Synthetically generated peptide
tgccccgcgaccctccgaac

SEQ ID NO: 11807 - DNA, 20 bp, Artificial
  Synthetically generated peptide
gtgccccgcgaccctccgaa

SEQ ID NO: 11808 - DNA, 20 bp, Artificial
  Synthetically generated peptide
ggtgccccgcgaccctccga

SEQ ID NO: 11809 - DNA, 20 bp, Artificial
  Synthetically generated peptide
cggtgccccgcgaccctccg

SEQ ID NO: 11810 - DNA, 20 bp, Artificial
  Synthetically generated peptide
tcggtgccccgcgaccctcc

SEQ ID NO: 11811 - DNA, 20 bp, Artificial
  Synthetically generated peptide
ctcggtgccccgcgaccctc

SEQ ID NO: 11812 - DNA, 20 bp, Artificial
  Synthetically generated peptide
cctcggtgccccgcgaccct

SEQ ID NO: 11813 - DNA, 20 bp, Artificial
  Synthetically generated peptide
acctcggtgccccgcgaccc

SEQ ID NO: 11814 - DNA, 20 bp, Artificial
  Synthetically generated peptide
cacctcggtgccccgcgacc

SEQ ID NO: 11815 - DNA, 20 bp, Artificial
  Synthetically generated peptide
gcacctcggtgccccgcgac

SEQ ID NO: 11816 - DNA, 20 bp, Artificial
  Synthetically generated peptide
agcacctcggtgccccgcga

SEQ ID NO: 11817 - DNA, 20 bp, Artificial
  Synthetically generated peptide
aagcacctcggtgccccgcg

SEQ ID NO: 11818 - DNA, 20 bp, Artificial
  Synthetically generated peptide
aaagcacctcggtgccccgc

SEQ ID NO: 11819 - DNA, 20 bp, Artificial
  Synthetically generated peptide
gaaagcacctcggtgccccg

SEQ ID NO: 11820 - DNA, 20 bp, Artificial
  Synthetically generated peptide
ggaaagcacctcggtgcccc

SEQ ID NO: 11821 - DNA, 20 bp, Artificial
  Synthetically generated peptide
cggaaagcacctcggtgccc

SEQ ID NO: 11822 - DNA, 20 bp, Artificial
  Synthetically generated peptide
ccggaaagcacctcggtgcc

SEQ ID NO: 11823 - DNA, 20 bp, Artificial
  Synthetically generated peptide
gccggaaagcacctcggtgc

SEQ ID NO: 11824 - DNA, 20 bp, Artificial
  Synthetically generated peptide
ggccggaaagcacctcggtg

SEQ ID NO: 11825 - DNA, 25 bp, Artificial
  Synthetically generated peptide
cgcgctgctgcccgacccacgcagt

SEQ ID NO: 11826 - DNA, 20 bp, Artificial
  Synthetically generated peptide
gcgctgctgcccgacccacg

SEQ ID NO: 11827 - DNA, 20 bp, Artificial
  Synthetically generated peptide
cgctgctgcccgacccacgc

SEQ ID NO: 11828 - DNA, 20 bp, Artificial
  Synthetically generated peptide
gctgctgcccgacccacgca

SEQ ID NO: 11829 - DNA, 20 bp, Artificial
  Synthetically generated peptide
ctgctgcccgacccacgcag

SEQ ID NO: 11830 - DNA, 20 bp, Artificial
  Synthetically generated peptide
tgctgcccgacccacgcagt

SEQ ID NO: 11831 - DNA, 20 bp, Artificial
  Synthetically generated peptide
gctgcccgacccacgcagtc

SEQ ID NO: 11832 - DNA, 20 bp, Artificial
  Synthetically generated peptide
ctgcccgacccacgcagtcc

SEQ ID NO: 11833 - DNA, 20 bp, Artificial
  Synthetically generated peptide
tgcccgacccacgcagtccg

SEQ ID NO: 11834 - DNA, 20 bp, Artificial
  Synthetically generated peptide
gcccgacccacgcagtccgg

SEQ ID NO: 11835 - DNA, 20 bp, Artificial
  Synthetically generated peptide
cccgacccacgcagtccggc

SEQ ID NO: 11836 - DNA, 20 bp, Artificial
  Synthetically generated peptide
ccgacccacgcagtccggcc

SEQ ID NO: 11837 - DNA, 20 bp, Artificial
  Synthetically generated peptide
cgacccacgcagtccggcct

SEQ ID NO: 11838 - DNA, 20 bp, Artificial
  Synthetically generated peptide
gacccacgcagtccggcctc

SEQ ID NO: 11839 - DNA, 20 bp, Artificial
  Synthetically generated peptide
acccacgcagtccggcctcg

SEQ ID NO: 11840 - DNA, 20 bp, Artificial
  Synthetically generated peptide
cccacgcagtccggcctcgc

SEQ ID NO: 11841 - DNA, 20 bp, Artificial
  Synthetically generated peptide
ccacgcagtccggcctcgcc

SEQ ID NO: 11842 - DNA, 20 bp, Artificial
  Synthetically generated peptide
cacgcagtccggcctcgccc

SEQ ID NO: 11843 - DNA, 20 bp, Artificial
  Synthetically generated peptide
acgcagtccggcctcgcccc

SEQ ID NO: 11844 - DNA, 20 bp, Artificial
  Synthetically generated peptide
cgcagtccggcctcgccccg

SEQ ID NO: 11845 - DNA, 20 bp, Artificial
  Synthetically generated peptide
gcagtccggcctcgccccgc

SEQ ID NO: 11846 - DNA, 20 bp, Artificial
  Synthetically generated peptide
cagtccggcctcgccccgcc

SEQ ID NO: 11847 - DNA, 20 bp, Artificial
  Synthetically generated peptide
agtccggcctcgccccgccc

SEQ ID NO: 11848 - DNA, 20 bp, Artificial
  Synthetically generated peptide
gtccggcctcgccccgcccc

SEQ ID NO: 11849 - DNA, 20 bp, Artificial
  Synthetically generated peptide
tccggcctcgccccgcccca

SEQ ID NO: 11850 - DNA, 20 bp, Artificial
  Synthetically generated peptide
ccggcctcgccccgccccac

SEQ ID NO: 11851 - DNA, 20 bp, Artificial
  Synthetically generated peptide
cggcctcgccccgccccacc

SEQ ID NO: 11852 - DNA, 20 bp, Artificial
  Synthetically generated peptide
ggcctcgccccgccccaccc

SEQ ID NO: 11853 - DNA, 20 bp, Artificial
  Synthetically generated peptide
gcctcgccccgccccacccg

SEQ ID NO: 11854 - DNA, 20 bp, Artificial
  Synthetically generated peptide
cctcgccccgccccacccgc

SEQ ID NO: 11855 - DNA, 20 bp, Artificial
  Synthetically generated peptide
ctcgccccgccccacccgca

SEQ ID NO: 11856 - DNA, 20 bp, Artificial
  Synthetically generated peptide
tcgccccgccccacccgcac

SEQ ID NO: 11857 - DNA, 20 bp, Artificial
  Synthetically generated peptide
cgccccgccccacccgcacc

SEQ ID NO: 11858 - DNA, 20 bp, Artificial
  Synthetically generated peptide
gccccgccccacccgcaccc

SEQ ID NO: 11859 - DNA, 20 bp, Artificial
  Synthetically generated peptide
ccccgccccacccgcaccct

SEQ ID NO: 11860 - DNA, 20 bp, Artificial
  Synthetically generated peptide
cccgccccacccgcaccctc

SEQ ID NO: 11861 - DNA, 20 bp, Artificial
  Synthetically generated peptide
ccgccccacccgcaccctcc

SEQ ID NO: 11862 - DNA, 20 bp, Artificial
  Synthetically generated peptide
cgccccacccgcaccctcca

SEQ ID NO: 11863 - DNA, 20 bp, Artificial
  Synthetically generated peptide
gccccacccgcaccctccaa

SEQ ID NO: 11864 - DNA, 20 bp, Artificial
  Synthetically generated peptide
ccccacccgcaccctccaac

SEQ ID NO: 11865 - DNA, 20 bp, Artificial
  Synthetically generated peptide
cccacccgcaccctccaacc

SEQ ID NO: 11866 - DNA, 20 bp, Artificial
  Synthetically generated peptide
ccacccgcaccctccaacca

SEQ ID NO: 11867 - DNA, 20 bp, Artificial
  Synthetically generated peptide
cacccgcaccctccaaccaa

SEQ ID NO: 11868 - DNA, 20 bp, Artificial
  Synthetically generated peptide
acccgcaccctccaaccaat

SEQ ID NO: 11869 - DNA, 20 bp, Artificial
  Synthetically generated peptide
cccgcaccctccaaccaatg

SEQ ID NO: 11870 - DNA, 20 bp, Artificial
  Synthetically generated peptide
ccgcaccctccaaccaatgg

SEQ ID NO: 11871 - DNA, 20 bp, Artificial
  Synthetically generated peptide
cgcaccctccaaccaatggc

SEQ ID NO: 11872 - DNA, 20 bp, Artificial
  Synthetically generated peptide
gcaccctccaaccaatggcg

SEQ ID NO: 11873 - DNA, 20 bp, Artificial
  Synthetically generated peptide
caccctccaaccaatggcgt

SEQ ID NO: 11874 - DNA, 20 bp, Artificial
  Synthetically generated peptide
accctccaaccaatggcgtg

SEQ ID NO: 11875 - DNA, 20 bp, Artificial
  Synthetically generated peptide
ccctccaaccaatggcgtgg

SEQ ID NO: 11876 - DNA, 20 bp, Artificial
  Synthetically generated peptide
cctccaaccaatggcgtggc

SEQ ID NO: 11877 - DNA, 20 bp, Artificial
  Synthetically generated peptide
ctccaaccaatggcgtggct

SEQ ID NO: 11878 - DNA, 20 bp, Artificial
  Synthetically generated peptide
tccaaccaatggcgtggctc

SEQ ID NO: 11879 - DNA, 20 bp, Artificial
  Synthetically generated peptide
ccaaccaatggcgtggctcg

SEQ ID NO: 11880 - DNA, 20 bp, Artificial
  Synthetically generated peptide
caaccaatggcgtggctcga

SEQ ID NO: 11881 - DNA, 20 bp, Artificial
  Synthetically generated peptide
aaccaatggcgtggctcgat

SEQ ID NO: 11882 - DNA, 20 bp, Artificial
  Synthetically generated peptide
accaatggcgtggctcgatc

SEQ ID NO: 11883 - DNA, 20 bp, Artificial
  Synthetically generated peptide
ccgcgctgctgcccgaccca

SEQ ID NO: 11884 - DNA, 20 bp, Artificial
  Synthetically generated peptide
tccgcgctgctgcccgaccc

SEQ ID NO: 11885 - DNA, 20 bp, Artificial
  Synthetically generated peptide
ctccgcgctgctgcccgacc

SEQ ID NO: 11886 - DNA, 20 bp, Artificial
  Synthetically generated peptide
actccgcgctgctgcccgac

SEQ ID NO: 11887 - DNA, 20 bp, Artificial
  Synthetically generated peptide
aactccgcgctgctgcccga

SEQ ID NO: 11888 - DNA, 20 bp, Artificial
  Synthetically generated peptide
caactccgcgctgctgcccg

SEQ ID NO: 11889 - DNA, 20 bp, Artificial
  Synthetically generated peptide
ccaactccgcgctgctgccc

SEQ ID NO: 11890 - DNA, 20 bp, Artificial
  Synthetically generated peptide
gccaactccgcgctgctgcc

SEQ ID NO: 11891 - DNA, 20 bp, Artificial
  Synthetically generated peptide
agccaactccgcgctgctgc

SEQ ID NO: 11892 - DNA, 20 bp, Artificial
  Synthetically generated peptide
aagccaactccgcgctgctg

SEQ ID NO: 11893 - DNA, 20 bp, Artificial
  Synthetically generated peptide
caagccaactccgcgctgct

SEQ ID NO: 11894 - DNA, 20 bp, Artificial
  Synthetically generated peptide
acaagccaactccgcgctgc

SEQ ID NO: 11895 - DNA, 20 bp, Artificial
  Synthetically generated peptide
cacaagccaactccgcgctg

SEQ ID NO: 11896 - DNA, 20 bp, Artificial
  Synthetically generated peptide
tcacaagccaactccgcgct

SEQ ID NO: 11897 - DNA, 20 bp, Artificial
  Synthetically generated peptide
ctcacaagccaactccgcgc

SEQ ID NO: 11898 - DNA, 20 bp, Artificial
  Synthetically generated peptide
gctcacaagccaactccgcg

SEQ ID NO: 11899 - DNA, 20 bp, Artificial
  Synthetically generated peptide
ggctcacaagccaactccgc

SEQ ID NO: 11900 - DNA, 20 bp, Artificial
  Synthetically generated peptide
gggctcacaagccaactccg

SEQ ID NO: 11901 - DNA, 25 bp, Artificial
  Synthetically generated peptide
cgggtccgacttcggaaaaacaggt

SEQ ID NO: 11902 - DNA, 20 bp, Artificial
  Synthetically generated peptide
gggtccgacttcggaaaaac

SEQ ID NO: 11903 - DNA, 20 bp, Artificial
  Synthetically generated peptide
ggtccgacttcggaaaaaca

SEQ ID NO: 11904 - DNA, 20 bp, Artificial
  Synthetically generated peptide
gtccgacttcggaaaaacag

SEQ ID NO: 11905 - DNA, 20 bp, Artificial
  Synthetically generated peptide
tccgacttcggaaaaacagg

SEQ ID NO: 11906 - DNA, 20 bp, Artificial
  Synthetically generated peptide
ccgacttcggaaaaacaggt

SEQ ID NO: 11907 - DNA, 20 bp, Artificial
  Synthetically generated peptide
cgacttcggaaaaacaggtt

SEQ ID NO: 11908 - DNA, 20 bp, Artificial
  Synthetically generated peptide
gacttcggaaaaacaggttc

SEQ ID NO: 11909 - DNA, 20 bp, Artificial
  Synthetically generated peptide
acttcggaaaaacaggttcc

SEQ ID NO: 11910 - DNA, 20 bp, Artificial
  Synthetically generated peptide
cttcggaaaaacaggttcca

SEQ ID NO: 11911 - DNA, 20 bp, Artificial
  Synthetically generated peptide
ttcggaaaaacaggttccag

SEQ ID NO: 11912 - DNA, 20 bp, Artificial
  Synthetically generated peptide
tcggaaaaacaggttccaga

SEQ ID NO: 11913 - DNA, 20 bp, Artificial
  Synthetically generated peptide
acgggtccgacttcggaaaa

SEQ ID NO: 11914 - DNA, 20 bp, Artificial
  Synthetically generated peptide
aacgggtccgacttcggaaa

SEQ ID NO: 11915 - DNA, 20 bp, Artificial
  Synthetically generated peptide
aaacgggtccgacttcggaa

SEQ ID NO: 11916 - DNA, 20 bp, Artificial
  Synthetically generated peptide
taaacgggtccgacttcgga

SEQ ID NO: 11917 - DNA, 20 bp, Artificial
  Synthetically generated peptide
ttaaacgggtccgacttcgg

SEQ ID NO: 11918 - DNA, 20 bp, Artificial
  Synthetically generated peptide
attaaacgggtccgacttcg

SEQ ID NO: 11919 - DNA, 20 bp, Artificial
  Synthetically generated peptide
gattaaacgggtccgacttc

SEQ ID NO: 11920 - DNA, 20 bp, Artificial
  Synthetically generated peptide
agattaaacgggtccgactt

SEQ ID NO: 11921 - DNA, 20 bp, Artificial
  Synthetically generated peptide
gagattaaacgggtccgact

SEQ ID NO: 11922 - DNA, 20 bp, Artificial
  Synthetically generated peptide
agagattaaacgggtccgac

SEQ ID NO: 11923 - DNA, 25 bp, Artificial
  Synthetically generated peptide
cggcctgtcgggtagcacaggagtt

SEQ ID NO: 11924 - DNA, 20 bp, Artificial
  Synthetically generated peptide
ggcctgtcgggtagcacagg

SEQ ID NO: 11925 - DNA, 20 bp, Artificial
  Synthetically generated peptide
gcctgtcgggtagcacagga

SEQ ID NO: 11926 - DNA, 20 bp, Artificial
  Synthetically generated peptide
cctgtcgggtagcacaggag

SEQ ID NO: 11927 - DNA, 20 bp, Artificial
  Synthetically generated peptide
ctgtcgggtagcacaggagt

SEQ ID NO: 11928 - DNA, 20 bp, Artificial
  Synthetically generated peptide
tgtcgggtagcacaggagtt

SEQ ID NO: 11929 - DNA, 20 bp, Artificial
  Synthetically generated peptide
gtcgggtagcacaggagttt

SEQ ID NO: 11930 - DNA, 20 bp, Artificial
  Synthetically generated peptide
tcgggtagcacaggagtttt

SEQ ID NO: 11931 - DNA, 20 bp, Artificial
  Synthetically generated peptide
cgggtagcacaggagttttc

SEQ ID NO: 11932 - DNA, 20 bp, Artificial
  Synthetically generated peptide
acggcctgtcgggtagcaca

SEQ ID NO: 11933 - DNA, 20 bp, Artificial
  Synthetically generated peptide
cacggcctgtcgggtagcac

SEQ ID NO: 11934 - DNA, 20 bp, Artificial
  Synthetically generated peptide
tcacggcctgtcgggtagca

SEQ ID NO: 11935 - DNA, 20 bp, Artificial
  Synthetically generated peptide
ctcacggcctgtcgggtagc

SEQ ID NO: 11936 - DNA, 20 bp, Artificial
  Synthetically generated peptide
gctcacggcctgtcgggtag

SEQ ID NO: 11937 - DNA, 20 bp, Artificial
  Synthetically generated peptide
agctcacggcctgtcgggta

SEQ ID NO: 11938 - DNA, 20 bp, Artificial
  Synthetically generated peptide
gagctcacggcctgtcgggt

SEQ ID NO: 11939 - DNA, 20 bp, Artificial
  Synthetically generated peptide
ggagctcacggcctgtcggg

SEQ ID NO: 11940 - DNA, 20 bp, Artificial
  Synthetically generated peptide
tggagctcacggcctgtcgg

SEQ ID NO: 11941 - DNA, 20 bp, Artificial
  Synthetically generated peptide
ctggagctcacggcctgtcg

SEQ ID NO: 11942 - DNA, 20 bp, Artificial
  Synthetically generated peptide
tctggagctcacggcctgtc

SEQ ID NO: 11943 - DNA, 20 bp, Artificial
  Synthetically generated peptide
ctctggagctcacggcctgt

SEQ ID NO: 11944 - DNA, 20 bp, Artificial
  Synthetically generated peptide
tctctggagctcacggcctg

SEQ ID NO: 11945 - DNA, 20 bp, Artificial
  Synthetically generated peptide
ctctctggagctcacggcct

SEQ ID NO: 11946 - DNA, 20 bp, Artificial
  Synthetically generated peptide
cctctctggagctcacggcc

SEQ ID NO: 11947 - DNA, 20 bp, Artificial
  Synthetically generated peptide
tcctctctggagctcacggc

SEQ ID NO: 11948 - DNA, 20 bp, Artificial
  Synthetically generated peptide
atcctctctggagctcacgg

SEQ ID NO: 11949 - DNA, 20 bp, Artificial
  Synthetically generated peptide
gatcctctctggagctcacg

SEQ ID NO: 11950 - DNA, 5860 bp, Homo sapiens
atcatgacacacatttacctgtgtaacaaacctgcacatcctacacatataccctggaacttaaagtaaaagttgggggggggggtaaaaaagaatttccaccgtgacattattgagtatagcaaaaaaaaaaaaaacaagaaacagcctagtgttcattagggaataaacgcattcaagcagcatcaaaccctgcagccattacaaagagatctatgttgaccatgtggaatatctccaagagccacagtagcctcccttatctgtaggattcactccaagaccctctgaaaccatggataatactgaaccctatatacactatgttttttcttgtatatacatacctacgataaagtttaatttataaattggcaaagggtatataaatattccttctaagagattaacaataactaataaagtagaacgattaaaacaatatactgtgatcaaagttatgtgaagccaggtgctgtggctcatgcctgtaatcccagcactttgggaggctgagacaggtggatcacctgaggtcaggagttggagaccagcctggccaacatgacaaaaccccgtctctactaaagataaaaaaaattagccgggcatggtgacacatgcctgtaatcccagctacttgggaggctgaggcaggagaatcgcttgaacctgggaggcggaggttgcagtgagctaagatcacaccattgcactccagcctgggcaacaagagtgaaactctgtctcaaaacaaaacaaaacaaaacaaacttatggggttgctctctttctctcaaaatatcctttttttggcagggcacggtggctcatgcctgtaatcccagcactttgagaggctgaggtgggtgaatcacctgaggtcaggagttcaagaccagcctggccaacatggtgaaaccccgtctctattaaaaatacaaaaaattagctgggcgtggtggtgcaggcctgtaatcccagctacttgggaggctgaggcaggagaatcactcgaacccaggagctggagtttgcagtgagccgagatcatgccattgcactccagcctgggccacagagcaagactccatctcaaaaaaaaaaaaaagaaaaaaagaaagtcttttttttttttgagactgtatctcactctttctcccaggctggagtgcagtggcccaatcatggctcactgcagcctcgacctcccaggatcaagtgatccttccacctcagcctcccgagtagctggaagtataggtgcacgcccgactgatttttttttttttttttagacggagtctcactcttgttgctctggctggagtgcaatggcaggatctcggctcactgcaacctctgcctcttagattcaagcgattctcgtgcctcagcctcccgagtagctgggattacaggtgcccaccaccatgcccggataattttttgtatttttaatagagacagggtttcaccatattggtcaggctggtctcaaactcctgacctcaggtgatccacctgcctcagcctcccaaactgctgggattacaggcgtgagccaccgggcatggcctttcctggctaattttttaaatttttgatagagatggggtctcagtgttgcccaggctgatcttgaactcctagattcaagtgatcctccctccttggtctcccaaagtgctgagattacaggcgtgagccaccgccccgggctggaaaatacttttttaaacgagggcaatgtgaatctgaaatgccatttgaggaaagatctgttcgcctgacatcctgtttgagcctgggtggacaggacagcacctgccagcatcgggaagcactgcagatgggaagaggcttggtcactctccaaaggtggcaggagttggagggggtgagctgaaggtaaggagaaaggaggtggggacccaggagacaggggctgcgcagcgggctcggggctgacacccccacggatacagttcactggggctcaaacataaaaggaacccaactattgtgggaggaaaagactcttctgcctttctgccttttctttttttctttttctttctttctttttttttttttttttttgagacagagtcttgctctatcgcccaggctggagtgcagtggcgtgatctcggctcactgcaagctctgcctcccgggatcacgccattctcctgcctcaacctcccgagcagctgggactacaggcgcctgccaccacacccggctatttttttgtattttttagtagagatggggtttcaccgtgttagccaggacggtctcgatctcctgaccttgtgatccgcccgcctcggcctcccaaagtgctgggattacaggcgtgagccaccgcgcctggctcttttttctttcttttttttttttccgagacagagtttcactcttgttgcccaggctggagtgcagtggcgcaatcttggctcactgcaacctccacctccagggttcaagcgattctcctgcctcagcctcctgagtagctgggactgcaggcgcgcaccaccacgcctggctaatttttgtatttttagtagagacagggtttcaccatattggccaggctggtctcgaactcctgaccttgtgatctgcccacctcagcctcccaaagtcctgggattacaggcgtgagccaccgtgcccagcctgacccctctgccctttcaaaaactatgttcgttctctcacagccttctcttgtcatattaagtccacaccgcaggcctaatttgtccagtgaatgctatgcaaatatttcatgcacctgctgatcgcaggaatgatatgtacttggtacgcactgatcgtacctcggggtgggagaagagagggcaaggaagcaaagaatagccccctcctttcctggtgcaccttcagatgtgccgatggggcccaggctcgctgcagatggcccccttcccagagacaggggaggatcctccacccactccccagcctccaggaccatcctgactcctgccttcaggcactcaagttatgcgtctagacatgcggatatattcaagctgggcacagcacagcagccccaccccaggcagcttgaaatcagagctggggtccaaagggaccacaccccgagggactgtgtgggggtcggggcacacaggccactgcttccccccgtctttctcagccattcctgaagtcagcctcactctgcttctcagggatttcaaatgtgcagagactctggcacttttgtagaagccccttctggtcctaacttacacctggatgctgtggggctgcagctgctgctcgggctcgggaggatgctgggggcccggtgcccatgagcttttgaagctcctggaactcggttttgagggtgttcaggtccaggtggacacctgggctgtccttgtccatgcatttgatgacattgtgtgcagaagtgaaaaggagttaggccgggcatgctggcttatgcctgtaatcccagcactttgggaggctgaggcgggtggatcacgaggtcaggagttcaataccagcctggccaagatggtgaaaccccgtctctactaaaaatacaaaaaaattagccgggcatggtggcgggcgcatgtaatcccagctactgggggggctgaggcagagaattgctggaacccaggagatggaggttgcagtgagccaagattgtgccactgcactgcactccagcctggcgacagagcaagactctgtctcaaaaaaaaaaaaaaaaagtgaaaaggagttgttcctttcctccctcctgagggcaggcaactgctgcggttgccagtggaggtggtgcgtccttggtctgtgcctgggggccaccccagcagaggccatggtggtgccagggcccggttagcgagccaatcagcaggacccaggggcgacctgccaaagtcaactggatttgataactgcagcgaagttaagtttcctgattttgatgattgtgttgtggttgtgtaagagaatgaagtatttcggggtagtatggtaatgccttcaacttacaaacggttcaggtaaaccacccatatacatacatatacatgcatgtgatatatacacatacagggatgtgtgtgtgttcacatatatgaggggagagagactaggggagagaaagtaggttggggagagggagagagaaaggaaaacaggagacagagagagagcggggagtagagagagggaaggggtaagagagggagaggaggagagaaagggaggaagaagcagagagtgaatgttaaaggaaacaggcaaaacataaacagaaaatctgggtgaagggtatatgagtattctttgtactattcttgcaattatcttttatttaaattgacatcgggccgggcgcagtggctcacatctgtaatcccagcactttgggaggccgaggcaggcagatcacttgaggtcaggagtttgagaccagcctggcaaacatggtgaaaccccatctctactaaaaatacaaaaattagcctggtgtggtggtgcatgcctttaatctcagctactcgggaggctgaggcaggagaatcgcttgaacccgtggcggggaggaggttgcagtgagctgagatcatgccactgcactccagcctgggcgatagagcgagactcagtttcaaataaataaataaacatcaaaataaaaagttactgtattaaagaatgggggcggggtgggaggggtggggagaggttgcaaaaataaataaataaataaataaaccccaaaatgaaaaagacagtggaggcaccaggcctgcgtggggctggagggctaataaggccaggcctcttatctctggccatagaaccagagaagtgagtggatgtgatgcccagctccagaagtgactccagaacaccctgttccaaagcagaggacacactgattttttttttaataggctgcaggacttactgttggtgggacgccctgctttgcgaagggaaaggaggagtttgccctgagcacaggcccccaccctccactgggctttccccagctcccttgtcttcttatcacggtagtggcccagtccctggcccctgactccagaaggtggccctcctggaaacccaggtcgtgcagtcaacgatgtactcgccgggacagcgatgtctgctgcactccatccctcccctgttcatttgtccttcatgcccgtctggagtagatgctttttgcagaggtggcaccctgtaaagctctcctgtctgactttttttttttttttagactgagttttgctcttgttgcctaggctggagtgcaatggcacaatctcagctcactgcaccctctgcctcccgggttcaagcgattctcctgcctcagcctcccgagtagttgggattacaggcatgcaccaccacgcccagctaatttttgtatttttagtagagacaaggtttcaccgtgatggccaggctggtcttgaactccaggactcaagtgatgctcctgcctaggcctctcaaagtgttgggattacaggcgtgagccactgcacccggcctgcacgcgttctttgaaagcagtcgagggggcgctaggtgtgggcagggacgagctggcgcggcgtcgctgggtgcaccgcgaccacgggcagagccacgcggcgggaggactacaactcccggcacaccccgcgccgccccgcctctactcccagaaggccgcggggggtggaccgcctaagagggcgtgcgctcccgacatgccccgcggcgcgccattaaccgccagatttgaatcgcgggacccgttggcagaggtggcggcggcggcatg

SEQ ID NO: 11951 - DNA, 4498 bp, Homo sapiens
acttaccaccctcagtggtttccagataacataggccttcctgaatcccccagttgaagcagctcctcccaccctgcccccacttactctctatcacatcaccttcttacctactgtattagctttctagggctgctgtagcaaagtaccacaaagtggatggcttagaaccaaagaaatatattgtctcagagttctggatgccagaaatccaaaattaaggtgtcagcaggaccatgttccttctaagggagccagagaagtatctgttccagacctctttcctggcttttggtagcctcaggtcttccttggcttacagatcaccctgtgtctctttacatcatcttccctcagacacggtacatgtctgtctctgtgtccagattgcccctatttataaggacgcagtcatattggtctagggctaacatcaatgacctcatctgcaacgatcctatttccaaaaaaggtcacattcccatgtgttagtcccagatgttaggacttcaacatcttttgggggacatcattcaacccataatatctgccattatctgaaattatcttattaacttggttacatgtttactgtcaaattctctcctctggaatataaactattagagcagttcaccagtatatcctctcagacctagaatagggactggcacatagtagatgctcaataaacatctgttgaatcgatgactgaggatatgttgtgtattattcacaatccctcaagcactacatacactgattacatatacttcccaagtgtgaggatacacagagcattcactatgtaacagtcattcccctccattccaaatgtatcagctcatttatcacactaccctttatgatatttactactgtatactattaatctcattttgtaaataagaaaacaaagcacagaacagttgaataaattgcataaggtcacatggttagtggatggtaaagaaccaggtggtctcaacttccaaatcctcagttgtaacactataccccctacctctctagaagcccgttacttctctatgcgtttctgagatgttagggacagccaagcaggaagaaacgcaggactatgaagcagccacaccaggactaggtgagaattctttggggatgattccagtcacctcccctaaaggggctttcatgctgaaagagccaagaggaagaaggattgtaaacactatccctagtcacaaaaccgggagaaaaatcaatctagttccacatatcacatccaataccaactataagaaaccacatacatttaaaagaaaagaaagacacttctggaggtgggaataactttctaagcagtataagtcatcaagaaaaataagcagatttgacttgaaaatttaaaacttcctgaacatctggaaaataattaaagcattcatgaaaaattactaaaaatactgagaaaaatactaataatccaatacctaaataatcaaagaatgcaaacataattcagaaaaaagtaactactgcttgagcccgggaggcggagattccagtgagctgatattgcaccactgcactccagcctgggtgacagagtgagaccgtgtctctttttttttttttttttaaaaaaaggccgggcatggtggctcacacctgtaatcccagcactttgggaggccaaggcgggcagatcaggaggtcaggagattgagaccatcctggctaacatggtgaaaccgtctccactaaaaatataaaaaattagccgggtgtagtggtgggcgcctgtagtcccagctactcgggaggctgagacaggagaatggcgtgaacccaggaggcagaggttgcagtgagccgagatggcaccactgcactccagcctgggcaacagagcaagactccatctcaaaaaaaaaaaaaaaagtaactacaataagcaaatacatagcaaaaagttcagccttaccagcaatcaatgatgctaattaaaataacaaggaagtgccattttttgcttttgttccccaaatatatgatacccaatactggccaaggcaatatgaaaacaggcttcctcatacattactggaagcagaatatagttatgtgcaagcactttggaaaatgattcccagtgttaaggaagagacattaaatagctgacacactcttaattctgtagtcccagttatgagtctctatcataagtagccagctcttcattgcaggattattgtaatcacccacaggggaaatagtagaatttccagcggtaaaaaaatacactaaggcagtacatttagtgtagtgtaatgtagccatgataactacaataactgtgtagcaacatagaaaaatgttaaatttaaaaagcagaagcctgggcaacaaagtgagaccccatctctttttttttttgagatggcgtctcgctctgtcaccgaggctggagtgcagtgtgagaccacatctctacaaaaaattttaaaaattagctgggcatggtagtgatcacctgtggtccctgctacactggaggttgaagcaagaggattgcttgagccaggaagtcaaatctgcagtgagccatgtttgtttgttccgcttcactccagcctgggtaacagagtaagacactgtctcaaaataaaaataaaatagacaatactacatacaattttgggttaagcagtggtttcttttacaccaaaagcataaacattggactttattgaaatgaaaaacttttggccaggcacattggctcacacctgtaatctcagcactttgggaggccacagtgggggattgcaaggggagatgggaaatgttctaaaactggattatggtgatagttgggcaactgtgtaaatttactaaaaattattgaactgtacatttaaaaagtgtgagtcttatggtatgtaaattataccccataaagttgtttttaaaaatgaagtaagtccctctgctcaagacccagtcatctcatctcattcaaagtgaaagccagagctttacaatccctataagagcctaggtggtagctcaacactcttacctccctcaccccattttctgtatctcttttcgttgcccatcttctagccacaccagcctctgctaatccccaaacaggtaccctctgtgctcttgctgttcccttggcctagaatgctcttccttaagatgcaggtaagaattccttcctcaccttcttcaagcttttatttgaatatcactttctttttttgttggttttgtgtgtgtgtgtggggggggggggtttgagatggagtttccttctgtcgcccaggctggagtgcagtggcatgatctcgactcactgcaacctccgcctccgggggtcaagcgattttcctaccccagcctcctgagtagctgggattacaggcgcacgccaccatgcccagctaattgtattttttagtagagacgggatttaaccattttggccaggctggtctcgaactcctgaccttgtgatccgcccgcctcggcctcccaaagtgctggaattacaagcgtgagccaccatgcccggccttttgttgttgctgttgttgttctgagatggagccttgccctgtcgcccaggctggagtgcagtggcccgatctcggctcactgcaacctccacctcccaggttcaagcgattctcctgcctcagcctcccgagtagctgggattaagctgggattataggcgtgccccaccacgcccggctagtttttgtatttttagtagagacggggtttcactgtgttggccaggctggtctcgaactcctgacctcacgtgatccgccctcctcggcctccccaagtgctgagattacaggcgtgagccaccgcgcccgccgccccctgaatttagagaatagcggagcctccccattctctgcggccttggctcctacacttcccgtggtaaccttgttcatccgctgaagcccgctgcttttcccagcccggcctctgggggccgctgccgggcctgtgagcctgtggaccaggagctcctgctgccgtcgtagcgtcacgtccggtctcggcggaagttttccggcggctaccgggaagtcgctgaagacagagcgatggtagttctggaggcctcgctccggggccgacccgaggccacagtgcctccgcggtagaccggacttgggtgacgggctccgggctcccgaggtgaagagcatcgggggctgaggtgggaccttagaagggagtctgggaaccctcacggctcttattggagtcccttccctgaccctgggctctaaactgcctttgctcaggctgtcccggaagcaggtcctccccgtatcataccattcctagagggaacggcgcaggttgggacttccctccctttaccatcgtcaccaaggcatgtggtaaccccgggccggaggtcaagggcgtcgcttctccctaatgttgcctcttttccacggcctcagggatg

SEQ ID NO: 11952 - DNA, 4507 bp, Homo sapiens
cttctgcacttaagcacactatacttttttcacccaaagtaccaaatcaaactagtcaggatacctacctttgtacaatgtcagactccagttaataactcccctagggcagagggcatatgcactgatttactttgtacaaattaaccagcatcaggcaatcaggcctgtgcctaacacatagtaagcactctatgattaaacatcagtgcttcggctccaaagttttatttatttatttatttatttattttttttttttttgagacggagtctcgctctgtcgcccaggctggagtgcagtggtgcgatatcggctcactgcaagctccgcctcccgagttcacgctcttctcctgcctcagcctcccgagtagctgggactacagacgcccgccacaacgcccggctacttttttttgtatttttagtagagatggggtttcaccgtgttagccaggatggtctcgatctcctggcctcgtgatccgcgcgtctgggcctcccaaagtgctgggattacaggcgtgagccaccgcgcccggcgccccgaaagttttaaaagcttcccctacaaaagaacagaactgaaattccttggtcctgtattcaatgtcttttgtaagtaatcacttctcccctacttaccctcctagtctaccgggctaccaggaattttttttttttttggagacagggtctcactctgtcacccaggctggagtgcggtggcgggatcacggctcactgcagccttaacccccggggcttgggtgatcctcccaccttagtctcaccagtagctgggactacaggtccacgccaccaggcctggctaattttttttatttttaggggagagggagttttaccacgttgcccaagctggtctcaaactcctgggctcaagcaatcctcctgcctcagcctcccaaagtgctgggattacaggcataaaccaccgcaaattctttacacctatcaaattccacccattatttgggacccagttgaaatccctctttggcaaaaagactttctagacaactccaggcctcataacctctcctttctctgaagatctgtagcattcagcctagcactgtccaatagaacgttctatgataacagaaaagttctacatctgtactgtatgttcttttatgtagaacagctaccttgttagcacaagtgtaaagtctcaccatctctttgatgacaacatgttacattggatggttaaaacatttatcagctcccccagtagactgcaatttctgtgaacaagatacaacttattcttcatagcaactctgacaaagttgcaaaaggtatatatatgttggccaggcaaggtggttcacgcctgtaatcccagcactttgggaggctgaggtgggcagatctcttgaggtcaggagtttgagaccagcctggtcaatatagtgaaaccttatctctactaaaaatacaaaaattagccgggcgtagtggcgggcacctgtaatcccagctactcaggaggctgaggtgcgagaatcacttgaacccgggaggaggaggttgcagtgagccacgatcatgccactgcactccagcctgggtgatagagtgcaactccaactcaaaaaaaaaaaaaaaaaagtatatatttgttgatttgcacatcacctaagaaaaccataagctaagaaggtttggactcaggcgtctggaaagttggtcaccacctctaccccacctcatatctgaatgtcaagagacacgtagaggcagagaagttaaagcaactttctagagacagaaatgaccactgatcaagccacaatgcactctggtttaaatgacatttaggtcatgactgtccttaatctaaaacaaacctagattagtatttcttttcattagtaaatagctaaattctgatggtaaattatgctgaccaaaaacagttcctcacttcccaagttagacatagcaattagaaaaataatctaagcaagctccatttgtatttcttttttcacctgtttattgaatatttacctcccatgaagtctttcagcctattggtggtattttactgttcagatatatgttagaatttcactgatacttactgggcgcggtggctcacacctgtaatcccagcactttgggagatagaggtgggcaaatcacaaggtcaggagttcaagaccagcctggccaatatggtaaaaccccggtctctactaaaaatacaaaaattagctgggcgtggtggcgcacgcctgtagtcccagctacttgggaggctgaggcaggagaatcgcttgaacccaggaggcagaggttgcagtgagccaagattgcgccactgcactctagcctgggcaacagagcaagactctgactcaaaaaaaaaaaaaaaaagaatttcactgatacttttcacaaaatatacagaaggaggcacaaattccaccactatggcactctgctgcgttggccaagtgtcttgatcctttggcctcaattttcttatctacgatattagggtaattgttatgtgaactacccacctcacaagtcctttgtgggttaattcataactgtgctgtgggtatttctttttctttcctttcttcctcctttcctttctttctttcttaaagatgggttctcattatggtgcttagactagactctagacccaattcctggcctctcaccatgttgcccagaccagactcaactcctggactcaaggaatcctcccacctcagccttcaattagctgggatcagaggtgtgcaccaccatgcctggcactgtggatatttctaagtgattattcttctcaaatgaactacataaaaaacaaaagattcatgaatttactaatggttctttgtgatggatgtgctaatatagagactaaaatcaaggctccaacctctaaaacatttttttttaaattccagacttgtttccccatcccactgtgcaaactgaacaaaaactgggctagcactcctgtctggaacatgtaataaggaaataaatgtgctgactcagagaacacagacatatttaatataaaataagatagaaaactggctgaaccaagtcataacacagtctaaatccacatataaaagattgagatgattttctgctttgctttattcaagcccaatgctttatcagcacagccagccaaaaatttacaacccatacacagactatgtaaacctttagttgcacatacagtaagaccagcaggtacacactatacacatttttaattaaaaaaatgactaaccactgattttgtcaccacacttaacaacgacctgatatggcacagagtgatgtgtaccaaacatggaaataccaacttgggcgacggtttgaatcttgttaacttcagtgcaaccacaccccccaaatgcatgtaaagtttgcacacatggttttttcaaggccagcctgtctttgtttccctctcctctgcatttacccaagatcttggctctgagacagaaaactcccactctcaattggttcattccgtcctatgcaattaagcaacaccacaatccagtaaatgcaatggctcaattatttatcttctggccgactttaccaggtatttggaaaaggacaatgtcaagaggtttatttctctctctagagctggcttgacgggttgatggggattttattttgtctttttttctcttttttacaaggcggggacgtggggggagcataatttaacctagaaaaagatgcgagggaatttagaaagagtaccggtctgtcaatttccctacaggaaacttgattcttatgcaataaagcctacccacgaccagccagcccgtaaggctgcaggcgacagacacacctattcctgcctccaaaagggcacagctgtctcctgaaggagcgggaacagggcaagcggaggaagtggctcagcgggagccgccgaccgggcggggaggaggcgctttccgaccccccactcgcgccggtgatccccgtcggcgtgacagtcgctccggtggccggaacgtccccagggccccagggagcaggaaatcgggggactgtccctcactcctgccgccgcaaccgagtgcgccctcgccccacggtgccccctcgagcgcgttctgtttctccgaagaacgaaacttccctccagcgccccgagtcccttccgaggcccgctcctgtcatcccgaagagtcttccctcagggcgaccctccgcgtctcttcatctctcccggccccactgcagcgtccatcacaacatccccaaggtcccagaggccccctgccgctgcggagcccccgggtccccaggcctccccaacggccccaccctgcacccccttcacctgtttctccggcagaggccgagaggccggggctgcgcgtgtgccggggacgggcggcgaggctccctcaggccgaagggcctctccgagccgagggggagagacagcgcc

SEQ ID NO: 11953 - DNA, 4504 bp, Homo sapiens
gtttcccttgaggccaggtcttgttaagaagaacagagagccctgagagtatttcacgatggttacttaccccttctccctggcaaaagcaaagcagatttttctcagatctttacagtgagaatctgacaggattcacagaggtaaaactgaggtaagtattgaggcccctctcagactgagcctccttggagttttttaactctcaagctagtctgcactgagcctccagcaattccccaattacagtttagtgttcctactgatgttggctccagctgtgaaactagcttcagcttctggcttctgtgcctgggctctgctcctggtaaactgtgattctctgaaaagctgtgattctctgtatctatctgtctgtctctctagtttttagggcagtggtttttcctgtgacctcaattctctggtggatctaagaagagttactgatttcagtttgcttagcttttttttttcttgttgtgaggatgggagtgacaacttccaagctctttacatgttgaacaggaaactgaaagccccttggtgttcctttgtaaattcatcttaaaaatatttatcataattgaaaagtgctaatatcaaattttcagtctgtttatattccccctaaactcagataaatatacattttattttgtgtgtctgtgtgtgtgggttttgttgttgtttgttttttgtgtttttttttaagatatagggtcttgctctgtcaaggctggagtgcagtggcacaatcgtacatctctgcagcctcgaactcctgggagaaagtgatcctcccgctttagccttcagagtagctacgactacaggcactaaccaccaagcccagctaatttttaaaattttttgtagagatgggagtttcactttgttgcccaggctggtctcaaactcttggcctcaagtgatcctcctgcctcagcctcccaaaatgttggaatcacagatactttgtgtcttgattcttgaaaggaaaaaacaaagatttttaatgcctcttatcttgtacgcactttccttccaaacaatacccttttgctgccattgttctcgttatgaatagcttaaagaaaaagaaacaactaagggtagtaataggccaggaatcacttactgaatactaggtcttcttgtatagtttgataccctataaattgtgtgcatctgatgcatttcaccttcaaaaggctcaatgctctgtattatttagtagtaatcaaaatttcaagttttacttaacctcctgattcactgcccaatttcctaataaatacgggctaagggtcaatggggtcatttgcaagtaatcttgtagtctactcagaaagttctgcaaagttagaaagtgattaaatgactgtttgttaagatatacttacatagtaataacctaaatgcatttgttaagtggttgtagagagagggatttaaaattttatcctatatgaaattttcctttttggtgtctgttatttaataggattgtttgaattaggggatactatttggtgcctttgtaactatatgaaaattagttggttgaatattactgctttccatgttcatatttatatttgtatagacatatatatatatacacatatactactttcctttccattttcatatttatatttgtgtatacacatatacataaacatatattttatacatttttgaaaaggaaaattaacttaagggcatatttaatgaatattcaaaaatttttttgctgatcaaattatcattctgctttaaacttttgaaatgatccaaaaaaattttaaatgacttagatttactgttacaaaatgcttgtcttttgatgtcacaaacattatatactataatcactggccagagataattgctataagtataatgaaaagggaaatgatggaagatctctgcagctatcctcataaatgagggtgggaacacgatgggcagttccaaagttgaaaatagagaatatatgtggatttatattaacataattggtattcttggatagttaaaaatggctaaactgtaggagaagcccgagtaattactgttaacagaggaataaatttgagggcaataataatgatgataggccaggcactgtggctcatgcctgtaatcccagcactttgggaacccgaggcgagcggaccacctgaggtcaggagttcgagagcagcctggccaacatggtgaaacctcgtctctactaaaaatagaaaaattatccgagtgtggtggtgcgtgcctgtaatcccagctacttgggaggctgaggcaggagaatcacttgtacctgggaggcggagttgcagtgagccgaaatcgcgccactgcgctccagcctgtgggccagagcgagactccgcctcagaataataataatgataataataataacgccaccaacaatactaagagctaacatttactgagtgcttactatgcaccagatattgttctaagtatacatttattatctcatttaaccatccataatactgtggtatagacacttttatatccattttataaataagtaaactgagttatggagagattaaacgacttgccagtaagattcaaagcctgtgtacaagctcacgcttgattctggagccagtgttcttaacacagtatcttgagaatgttaaactaaaaagtttttaatttacagtattctttccacaattaaaaaagaaattatgagtaattatttttagttctttcttctcttcaggcatttcccatggttcttttcaagacataatacatatcatttagtgttgtagatctgaaaaaacaaaagtagcgtgaagatcaaaaattttctaaagagacggagtctcgctacgttccctaggctggaacacccaggcttctccagcctcacacctctgagtagctggaaccaccctgtccgctaaggtcaatgtttaatcgtatctttgtaggtctactgaccagttaaaaagaggtgctgtatacattggttgttgtcttgtcagagtttgatgcttctatatagaccattgtttttacatgctaatacaattgaaagccactacagatatttatatttacaacccaaagctaggttttaacaagaaactcataaggcaaaggtgagaagtaaaataatttagcgccaagtggagatatatgtgcaatgctactttgttgggctcaaaacatatttttcttttagaagactgacaggcttgaagtttatgcctccaaagacaaaagtgattatgttttgtttagtagcttgcaaagttgccaaagccattttttctactctttccctgaaattggtttatatgcttattaaagtcatttatacctatttgcaaatgcttaacatagtttcagattttaagatttccctgcaactttatttcccttgaagtttacagcaacaggagttcatttttatttttaattgcatttattcagtaagtaaactccgccacagaaaaacttagtagacaaggtgagttcccctgtgctccgtggcaaagagtgcggtgggtgacattgacccatggttaggtaatctggtaaggaaagaccccgttgtaacacatctgagcaacgagaccaaaggaagggcttgctgccacgaggcgaagtctgcttttttgaacagagagcccagcagagttgggcggcaatcgtgcccagcactgaggccgaggagaaagagagcaggagcattacattactgcaccaagagtaggaaaatatgatgcatgtttgggaccaggcaaccgaaatcccttctcagcagcgcctcccaaagccgggcaccgccttccttcggagaaggcgcagagtccccagactcgggctgagccgcacccccatctcctttctctttcctccgccgctaaacacagacgagcacgtgagcgtcgcagcccgtcccagctgtgcctcagctgaccgcctcctgattggctgagagcggcgtgggctggggtggggacttgccgcctgcgtcgctcgccattggatctcgaggaacccgcctccacctcaggtgaggcgggcttgcgggagcgcgcgccggcctgggcaggcgagcgggcgcgctcccgccccctctcccctccccgcgcgcccgagcgcgcctccgcccttgcccgccccctgacgctgcctcagctcctcagtgcacagtgctgcctcgtctgaggggacaggaggatcaccctcttcgtcgcttcggccagtgtgtcgggctgggccctgacaagccacctgaggagaggctcggagccgggcccggaccccggcgattgccgcccgcttctctctagtctcacgaggggtttcccgcctcgcacccccacctctggacttgcctttccttctcttctccgcgtgtggagggagccagcgcttaggccggagcgagcctgggggccgcccgccgtgaagacatcgcggggaccgattcaccatg

SEQ ID NO: 11954 - DNA, 4518 bp, Homo sapiens
ggcattaaaaaagaaagcttatatagtggaagaaaataaagcatctagacataagctttaagagatctattgtgttaatacagctttactttttgagtggtaagcttttaaaaagaaatgtggtgctctaactccaggaaaagataagggtgactgaagtgatagtctagaggaaaaagatgcagacatttactgagtacctccaatgtgccaggtgccattctgggcattttcattatgtttcctcatttaattctcatggtgatcctttggaactgtgttattctcatttttacagatgaggtaactgagagacagtcagattaaagaactgcctatgattgtttggctaataataagtggaggggtgaggcttgaaggcaggtttgtcttattccaacacccatacatacccttaaatttaagttattctgacttgtgttgctcaaatccaatgtgttcagctgtttgcttctccaattaccaagatttttctttaaaaggtaggacacttttggcaacacgaaccaactttgctcagtattgttataaactgttaactggagacatttgaatttggagatggaactgaaatggtcttgcggtactagagaagatcaagttatcacataaacaaagtacagagctgagaacatattttaaatctttccactaactctgacttttattgactaaaattttagtgggcagtatgtttatgtttatgactcttaacattaacaacatcgtaagtcaaactcactaatatatgttaagcattctgtttatgattcttttaacctagaggattgttgagctgggactaatttcctcaaatgggaaaaaaacccaggtgagagctgagactgctcctgagactgagaaaggcagctctgacgggatctcagattttagcagcaggagttgaacaatgggcatagaatcagcttgcccaagatctcctgattaataaaccatggaacaagatttaaacccaagttcatttcatttcaaagctcataccacattttgcccaccatattttgctttgttatatgactacaacttagttcaggcttacaaaaaagtcctaattctaaaattcctatggcgtgggtgggaggggatttagatgattttgcataggcaagaaacacccagtttcatggagtttgatggaagagttatgtactaatatgggaaaagtagaggccatctttgtctttgttctttcttttttagacgggagtctcgctctttcacccaggctggagtgcagtggcgctatctcggctcactgcaagctccgcctcctgggttcacgccattctcctgcctcagcctcctgagtagctgggactacaggcgcccgccaccgctcccggctaattttttatattttcagtagagacggggtttcaccgtgttagctaagatggtttggatctcctgaactcgtgatccgcccgcctcggactcccaaagtgctgggattacaggcttgagccaccgcgcccggccgtctttgttctttcttgaactcttccttttcttgggtgatagacttcgtcaacgtctaatgaggatatctaggtgctagtctctgctcatcaaatgattcttatggctcaggagccgaatgggacgtaaataaacagttaagtctcatgaactcactttgcattcatctctagaagatgacaaaacatttgtatttatgtgtagcgtggcactttagttaaactttgtaccccactttgctctattttaaagcagaatatccttaaaaaggatacttagtcctgcttttttttttccgcctaagcccatttagtccttctactcattatgcaaggactcaaatggttatctttacagaagtgagacaagatagaatcaatgctcttgtagtcacttcatctttgtccattcccacttctgatggagagggttctaggacataatgcactgaaggttacattgtgagagatgaacaacatttgcaaaagaggtctttttgccttggaaaggcttcattcttaaaaaaaaatgtgagcatcaaggttaagtagacctcattagctcaaactttaaggatgatatcaggataaagttgggcccatgagaagagaatgagagggagatatagtgacatgaaaataaggaggaaaacgaggtgtctatgtaagttgggctcaccataaatacaaaggcaaccgttagggaaaagcaaagaagtctttgcacatcctcagaactctgaatgtcttagtgatgctgtatgagtgagtcttaatgatagtgaactgaatcagtcaagccaggttgtgtccatatgagaatgtgtctttgctaaacatgccaacatcactgaagcaaagaaacttggagttttctttaagatataggtcttttttacctatccggcccaagctttctcttcttgtcactccatgcactgtgttccgtatgctaaatagtttgagaaacccaaatgggccatgttcgcctacatttcattgtcctgtacttcctgtcctgtactagcaaagcagtcccattggtctttcttctcctcattaacaataaaggtaacacttttgatgttgtttcttcagaaaaccttcattcatcaaaactgcctcaaagatcatgtttgtttgattccagaacttcctgtaattacctgttattgtaacactcatcactgtattttacttacttgtgtaactaattttccatattctgcactagacaacaaagtcctttaagtcaggtactatatctatttacatagcattcacatctcctacaataagggacattagcagataaacaacacatattaaatgaataatgaagtttctgaaatactacagttgaaaactataggagctacattatatagaataaacatttactttgctatagaattcagtgtaacccaggcattattttatcctcaagtcttaggttggttggagaaagataacaaaaagaaacatgattgtgcagaaacagacaaacctttttggaaagcatttgaaaatggcattccccctccacagtgtgttcacagtgtgggcaaattcactgctctgtcgtactttctgaaaatgaagaactgttacaccaaggtgaattatttataaattatgtacttgcccagaagcgaacagacttttactatcataagaacccttccttggtgctctttatctacagaatccaagacctttcaagaaaggtcttggattcttttcttcaggacactaggacataaagccacctttttatgatttgttgaaatttctcactccatcccttttgctagtgatcatgggtcctcagaggtcagacttggtgtccttggataaagagcatgaagcaacagtggctgaaccagagttggaacccagatgctctttccactaagcatacaactttccattagataacacctccctcccaccccaaccaagcagctccagtgcaccactttctggagcataaacataccttaactttacaacttgagtggccttgaatactgttcctatctggaatgtgctgttctctttcatcttcctctattgaagccctcctattcctcaatgccttgctccaactgcctttggaagattctgctcttatgcctccactggaattaatgtcttagtaccacttgtctattctgctatatagtcagtccttacattgctttcttcttctgatagaccaaactctttaaggacaagtacctagtcttatctatttctagatcccccacattactcagaaagttactccataaatgtttgtggaactgatttctatgtgaagcacatgtgccccttcactctgttaacatgcattagaaaactaaatcttttgaaaagttgtagtatgccccctaagagcagtaacagttcctagaaactctctaaaatgcttagaaaaagatttattttaaattacctccccaataaaatgattggctggcttatcttcaccatcatgatagcatctgtaattaactgaaaaaaaataattatgccattaaaagaaaatcatccatgatcttgttctaacacctgccactctagtactatatctgtcacatggtactatgataaagttatctagaaataaaaaagcatacaattgataattcaccaaattgtggagcttcagtattttaaatgtatattaaaattaaattattttaaagatcaaagaaaactttcgtcatactccgtatttgataaggaacaaataggaagtgtgatgactcaggtttgccctgaggggatgggccatcagttgcaaatcgtggaatttcctctgacataatgaaaagatgagggtgcataagttctctagtagggtgatgatataaaaagccaccggagcactccataaggcacaaactttcagagacagcagagcacacaagcttctaggacaagagccaggaagaaaccaccggaaggaaccatctcactgtgtgtaaacatg

SEQ ID NO: 11955 - DNA, 10605 bp, Homo sapiens
taatcaacaaagcattcatggagaaaataggtcttattctaaatcttgaatgagagagaattgtagcaaacagaaagacaaaaaggtgctgggtgagaaaaggagcagagacataaataaaatatccaattttaagggtatagagaggggattcactcaaggaggggagaccatctatctgctttgagaagctgggaaacaaagtcatagggtcaggatggtgcctgactatggatgctctcaaaagctaggcaccaaggatttggactggattcagctggatataagaagttattacagacttggaagcaagattaagtctccgggaaggggagacttaactgggaccagagatcattttcccctataattttaaaggtacttatcatctttaggtactcattaggtacttagcttgtaactctttccactgttcaaatatatacccagtatgcatgtagcctatatggagcaggcacagagtaaatgtttgatgatgataaaagacatgcggaagaaaggttaatttggcaacatcataaaactgaattgagacaaagaaagccaggaggtaggaaagtcaatgaagaagttattccagaaatgtagctgagaaggaaggaatacagaagaggcagatatgggaaaatactcaggaagtataattaaaaggagctgtgactaattttaataaggactgggttaaaaattaagttttcatgtctaaatgttctggaggaccatgatgtcactcaggtaagatggaggaattgagagagggaattcgttagagggaataacatggggaatttggctttggacaggcatttgccatgataacagaatattcatttagaaatggtccaggaaattggtttgatgagaatgaagtgcctgtgaagagagaggactgaagcttgttataatttcattcacttcaggaatatttacagaggacccaaatgtgctaagaactatgaaaacatagaattaaaagaaatgggcctggaataatttacaacctagtaaagcagttatgggaaaacatatttgcaaaaaaggtatacaaagtataatgaaataagtgtccagtaaggataaagtgcagagtaagtgaattaagcagcacccattcatgtgttcaaattcctgccagagtcaaaaggttgtgctgaagtagagtccatgaaagcatcgtagatggctcctcctgctcaagttcccctgctctgcgtcctgctactctggccacaaccgtctggacccagggttgacacacaaacaaacacaataatcttttagccagacataaagaaggccagccaccaatcaggaaaattgtgtcccataaaggcccttcctattgaacagtgaatgacagacatggccagatcttctctcttggaatgctttgaatgttagtcacagagagtgaccactagaagcacagatagcagtagaagctaagactacatgaaaaagcagtggacagatggtgatttatgagaatggcaaaattactagagtcataggcaatggatacttgttaatgaagggatgagcagggccccacagcctgttgctggctcacaagtgcagttgattgctggactgaacagcagctctccgcctgatgatagggttttttaaagtgtccttattgccttaaagtaaatcctcagcatttgcagtgctctgagggtgtcctagcattttataccttttttctaagagcccaggtaacataagggtactcctgttgttctggctttaattctatctgcagaagagggtttcttgtgaaagaaagggtcagtatggtcttttatctgtacagcagataaaaagggtatgtacgtgcacacctttgtacgtggctgccttcccaggacagtctgacagtagagggtagaaacttcagttgtagctgagagcaggcctggaatccccatgcttatactttttatttcctcccccctttcccattgtgatcacaggctacttcagtgtgcttgtccttggagagagcaagggaagggagagccagggagactgttcaagggagccaccaggctcgagaaagaggaacccctgaagacagtagaaagtgcaggtgccaagaatttgaatatctacatcagagtttctcaatgtgcacacagtgaactaccagtttaggatcatttgatttgctaaaaatgaagattactggtctaccttagaccaactgaataaaatatctgggtgaggggcctaggaacttgcatttttggtaggcatggcaggtgattcctaaagcatttacccttgagacctctatgttaaggaaagaaaggtaatgttgcaaggaggtggtgccggcttctaagaaagtacccaggactgaacggcagaaagacctgacataccatatgtataaattgctgtggaagtgaaaaggaaagagaaagtgtctgaggtaaaactggagtgtggggtgcgtggaacaaatggttggatgcagatttgctttacgaatcatgagcctagatgataactgagaccatgtggatggattaggtttctgctaatgccagaatttttataatcagcataaaagtgctatataaagctttcccctcttctatattatagtccttttaagatgtatggaacatcaactataggaagaacatcatattcacagctgtaagaggaaacaagaacttatcatgcacttgatgttgtacaaaataaatctgtgatttatgcttgagtgaccacaaagtagcatacacataagcgcaaattcattcatttaagaattccttgtgtctattatgtacgagataagtatctctgagctgcacggaatgtggcttatcagaaggtgacctaagtttcaaagcagattttgttaagatgaagacagagattgacaggaggtttaagacactctgtctaaagtaaagatttagagtcacagagttcatggattaggatttagaatccacagagggtccacagattcactcattcaacattccataaatatttattgaatgcctttttgtgtcagagactgtcttaggtgctggaaatttagcagtaaatgaaacagaccaaaacccatgccctcatggagcttacattctgatggtagagagacaagaaaacaaaatagatagtgtattattgaaggtgatgagagctctggagaaaaagtaggaaaagagacagatctgggacaagggcgaaattacagtatcaaagatgatctttttagggaagatctccttttaaaaacactttggaacaaagatttaaatgaggtgccagaggggtagcaagtgcatattccctgaggaagacgcctgcctggcattttcaaggaacagccagtaaccaatgtttatctacgtaagtaaggaagggagaacagtaggatgagagttcagagaagagggtaggggatatcaaataatttaaggccatgtaggatttttgagaagaattttgcttttatgtcaagtggaatgagggccactgatgatctgggagtagagtgactatgatccgacatgaagtatactccattttttaactatgtgaacttgtgccaacgttttaacctctaaatctgtttcgtcatttgtaaaacggtaaaaagtattttacctcataaggttgtcgtgatgattaaataagatgatacgataagtgcaaaagatttagcttgtacttaacatagagtaggcacattttctccccttccctgtctttcacttttctcttctgccccttccacctggcgctaggagggggagactggaataaaccttgcagattacagcccgtgtaagagtagaaaggaaaggatgacagttgatgtaaagccttggttaacagacataatagctgggatttaaattcagctttattggtggtttatgatgtggactagaggaatggaactgaaagtctcggaggaggggcgatcctatcaggtacaggcgctgcttttccagccctcaatcctcaagactctcccaagatacatttctaggtagtttatcaacacagactccgggtatgctagcatgtttaattgccccattgtttaatgtcttaactccacgaactttaactgattaatctgtcttctaattaatgtttgaatgactctcctcaggtctaaactaccaaggccatctctacttaaaaacagttgtcttttgtttgtgatttcaggggccctgggtataagcgaagtccctgtttagagaccttgtgatgggttcaaaatatcaagaaagatagcaaaatatcacaagcctcctgacccgagaagattagcgttgaaagggtctgtcgtgtttgtttgggcctggggctaaattcccagcccaagtgctgaggctgataataatcggggcggcgatcagacagccccggtgtgggaaatcgtccgcccggtctccctaagtccccgaagtcgcctcccacttttggtgactgcttgtttatttacatgcagtcaatgatagtaaatggatgcgcgccagtataggccgaccctgagggtggcggggtgctcttcgcagcttctctgtggagaccggtcagcggggcggcgtggccgctcgcggcgtctccctggtggcatccgcacagcccgccgcggtccggtcccgctccgggtcagaattggcggctgcggggacagccttgcggctaggcagggggcgggccgccgcgtgggtccggcagtccctcctcccgccaaggcgccgcccagacccgctctccagccggcccggctcgccaccctagaccgccccagccaccccttcctccgccggcccggcccccgctcctcccccgccggcccggcccggccccctccttctccccgccggcgctcgctgcctccccctcttccctcttcccacaccgccctcagccgctccctctcgtacgcccgtctgaagaagaatcgagcgcggaacgcatcgatagctctgccctctgcggccgcccggccccgaactcatcggtgtgctcggagctcgattttcctaggcggcggccgcggcggcggaggcagcagcggcggcggcagtggcggcggcgaaggtggcggcggctcggccagtactcccggcccccgccatttcggactgggagcgagcgcggcgcaggcactgaaggcggcggcggggccagaggctcagcggctcccaggtgcgggagagaggtacggagcggaccacccctcctgggcccctgcccgggtcccgaccctctttgccggcgccgggcggggccggcggcgagtgaatgaattaggggtccccggaggggcgggtggggggcgcgggcgcggggtcggggcgggctgggtgagaggggtctgcaggggggaggcgcgcggacgcggcggcgcggggagtgaggaatgggcggtgcggggctgaggagggtgaggctggaggcggtcgccgctggtgctgcttcctggacggggaaccccttccttcctcctccccgagagccgcggctggaggcttctggggagaaactcgggccgggccggctgcccctcggagcggtggggtgcggtggaggttactcccgcggcgccccggcctcccctccccctctccccgctcccgcacctcttgcctccctttccagcactcggctgcctcggtccagccttccctgctgcatttggcatctctaggacgaaggtataaacttctccctcgagcgcaggctggacggatagtggtccttttccgtgtgtaggggatgtgtgagtaagaggggaggtcacgttttggaagagcataggaaagtgcttagagaccactgtttgaggttattgtgtttggaaaaaaatgcatctgcctccgagttcctgaatgctcccctcccccatgtatgggctgtgacattgctgtggccacaaaggaggaggtggaggtagagatggtggaagaacaggtggccaacaccctacacgtagagcctgtgacctacagtgaaaaggaaaaagttaatcccagatggtctgttttgcttggtcaagttaaacccgaagaaaacccgcagagcagaagcaaggctttttccttgctagttgagtgtagacagcaatagcaaaaatagtacttgaagtttaatttacctgttcttgtcctttcccctatttcttatgtattaccctcatcccctcgtctcttttatactaccctcattttgcagatgtgttctacatctcaagagttattacagtactccaaaacagcacttacatgattttttaaacttacagaggaattgtagcaatccaccagctaaccgcctgaaatagacttaaacatgtgcatctcctttttttttttttttttgagacacagtctcgctctgttgcccaggctggagtgcaatggcgcggtatcggctcactgaaacctccgcctcctgggttcaagcaattctcctgcctcagcctcccgagtagctgggactagtaggtgcacgccaccatgcccagctaatttttgtatttttagtagagacagagtttcatcatgttggtcaggatggtctccatctgctctgttgcccaggctggagtgcagtggcgccgtctcggctcactgcaacctctgcctcctgcattcaagcaattctcctgcctcagcctcccgaataactgggattacaggtgtctgctgccatgcccggctaattttttgtatttttagtagagacgggggtttcaccatgttggtcaggctggtctagaactcctgacctcgtgatctgcccgcctcggcctcccacagtggcatgtgcatcttatagctgaagtctaagccttcttaaatcttgagatccatcaaaacagacaggttttctaattgttatacaatgtatatgttatgtttataatagaaatcattttacaaataagttataaatgggaaaggtctatttgtaattatcagctcagaattaaccataaaactggtgtcactgaagtgactgaggtccaaaatgctgactctgcatgttatagactacagatatcaaatatggttgctaacaatagtttactttgagactgtagccatccacagtatatttgcttttaagagatggtagatggtaattcagttttatgaaaaataaaaatgaattttcttccattacaaaattgttggattcgagtccagtccactccttactagcttttctaactctcggtgagggatcccctcccagcccatgatcttcatttggtaagactcctttggaacccagttctctctagtggatttaaatgtgatttggttttaaaaatctcattcaaggaattttttttttttctggaaacaaccaccgcataaacaagtaaaccggaagatacatgtggctctgaattcatatatatacacaaactctaatccaatgtctgtccacagtatttcctaggctagtaaactttttggccttaacgacccctctaccctctttgtttttttgagagagagagtctcactctgtcacccaggccggaatgcagtggcgcgatctcggcccgctactacctccgactctcaggctcaagcgattctcccgcctcagcttcccgagtagccgggattacaggctcccgccaccgggctaattgtatttttagatacgggatttcaccatgttggccaggctggtctcgacctcctgacctcaggtgatccgcccgcctaagcctcccaaagtgctgggattacaggccaccacacccggcctacactcttaaaaattatcgaaggggccgggcacattggctcttatctgtaatcccagcactttgggagactgaggcgggaggatcgcttgaggccaggagttggagaccagcgtactcaacatagtgagaccttgttataaagaaaaaaaaaatccaggattaaaaaaaatctttgatttgtttgggatttattaatatttaccgtattggaaattaaaacaattttttaaaatgtattcatttaaaaataataagcccattacttggtaacatgaataaaatattttatgaaaaataactattttccaaaacaaaaccaaaacttagaaaagtggtattgtttcacacttcagtaaatctctttaatgatgtggcttaatagaagatatggattcttatatctgcatctgcattcaatctattatgatcacacatctggaaaacttgtgaaagaatgggagttaaaagggtaaaggacatcttaatgttattatgaaaacagttttgacctcttgcacaccagaaaagtcttagtaacctgaggggttcctagaccacattttgagaactgttttaggctatgcaaactggttggggggaggttggggtaggcagagagctagaagatacattttagtgtaattctcctcatctattcctaattgctttggcctacatttgaaataaagcgtggaggcaaacgggataagatacatgtttgtagtggttgttaacttcaccctagacaagcagccaataagtctaggtagagcagagtaaggcggggaactatgccgtgaccgtgtgtgatacaatttttctagcctgtggtgctttttgcggcagggcttaggagtaaggttagtatgttatcatttgggaaaccaaattattattttgggtcttcagtcaattatgatgctgtgtatatttagtgtttatctacaatatatgcacattcattaatttggagctactcatcctataataaatagttgtgcatttactcccatttttttctgcatttctctccttatttataattatgtgttacatgagggaaaggaggtgaaattaaacattcatattatttcaaaaaatttgaaacaactaactaaaaaatatgttttattttctgtatggtgtttgttatacaatctgtcaatattcatgcacctcttgggagacagtgtatgaaaagcaaagagtaacagtcacatggattactgattactgagatatattcacttgcatctttttttttttttgagacggagtggctctgtcgcccaggctggagtgcagtggcgtgatctcggctcactgcaagctccgcctcctgggttcacgccattcttctgcctcagcctcccaagtagctgggactacaggcgcccgccaccacgcccggctaatttttttatatttttagtagagacggggtttcaccgggttagccaggatggtcttgatctcctgacctcgtgatccaccctcctcggcctcccaaagtgctaggattataggcgtgagccaccgtgcccggctcacttgcatctcttaacagctgttttcttactaaaaacagtgtttatctctaatctttttgtttgtttgtttgttttgagatggagtcttactccgtcacccaatctggagtgcagtggcgtgatctgggctcactgcaacctctgcctcccgggttcaagtgattctccttcctcagcctccccagtagctaggactacaggagagcgccaccacgcctgattaatttttgtatttttagtagagagagggtttcaccatattggccaggctggtcttgaactcctggcctcaggtgatccacccgccttggcctctgaaagtgctgggattacaggcatgagccgccgcacccggctttctaatctttatctttttttgtgcagcggtgatacaggattatgtattgtactgaacagttaattcggagttctcttggtttttagctttattttccccagagatttttttttttttttttttttttgagacggagtcttgctctatcgccaggctggagtgcagtggcgccatctcggctcattgcaacctcggactcctattttccccagagatatttcacacattaaaatgtcgtcaaatattgttcttctttgcctcagtgtttaaatttttatttccccatgacacaatccagctttatttgacactcattctctcaactctcatctgattcttactgttaatatttatccaagagaactactgccatgatgctttaaaagtttttctgtagctgttgcatattgacttctaacacttagaggtgggggtccactaggaaaactgtaacaataagagtggagatagctgtcagcaacttttgtgagggtgtgctacagggtgtagagcactgtgaagtctctacatgagtgaagtcatgatatgatcctttgagagcctttagccgccgcagaacagcagtctggctatttagatagaacaacttgattttaagataaaagaactgtctatgtagcatttatgcatttttcttaagcgtcgatggaggagtttgtaaatgaagtacagttcattacgatacacgtctgcagtcaactggaattttcatgattgaattttgtaaggtattttgaaataatttttcatataaaggtgagtttgtattaaaaggtactggtggagtatttgatagtgtattaaccttatgtgtgacatgttctaatatagtcacattttcattatttttattataaggcctgctgaaaatg

SEQ ID NO: 11956 - DNA, 4519 bp, Homo sapiens
tcttgaaaataatctgtcctctctatctagttcctttaaatatcttctctctctctctgatattctgcagtttaattatgatgtatctacttgtgtgtatgtgtgttttaaaaattatcctgcttaagacttattgagcctcgtgaatctgtggattggtatctgtgataggcagacaatggctccccaaagatcttaaatgtcttaatctccagaacctgtgatagtctaagttaaggttgtagatgaaattaaagttaccaatccacagacctcagggtaaaaagattatcctggattatttaggcaggcccagtataatcacaaggattcataaaacggaagagggagacagaagagatggtcagagtgatatgaagtaaaaaggattcagcttactcttgctggatttgtaaatgcaggaagggaccacgagtcaaggaatgcaggtagcttctagaagctagaaaaggtaagaaacaaattctcccctaaagcctccagaaagggatacacctgccaatactttcattttatccctgtgagaccagtgttagacttctgacctccaagagtataagacaataaatctgctgttttaagccactaagttttgtggtaatttgttatggtagctatggagaactgatacagtgcctttcaatagttcttggaaattcttcaaatatattccccaaatattgcctttgcaccactcactctatcctctatatctcttgacctctctttaacattttttattttcttattttggtaattatttaaaacaattggcttcttgttccacttcaaataaattcatatttttatatctacatattaagaattagttcataaatgtaattgttgtatcgtatatactttaaaaggaaaattgcatttatacttggatattattatattttaggttttgaaatttctttttttaaatgtctgataaatttattctgatcaaaattaaaatcttattgtatttacagtagtctactaaaagagtttacatcaattctctcctttaaatgctagcaattcagttttgtgtggtcaaagataatttagaatccttttatggtaactgatatgatacaaaggatttttttggttgttgtcaaatttgtatgtgcgtatatatgtatagggggtagaaaatttggttagtgactctattttggaaaaatgaatgttctttttggagttttagattcccagtgtttcaaaccaagtttgcttttgataaggaattcagtgaatctttattttctcgtagagaatttttaaacaatacctttcaaaatattgtatgtattcctatataattttgccttggaataaaaaaagtcatcacattaagaatatttttaacttaagaaattttttcaagattctttcaaaatgctaactccctcattgatttgaaaatacttttagagtttaaactattatgaccatgtagggataacttaaagtgtccttctaaatttttttttcattaatgtcatgcttctttctaagaacaaagtgtttcaatgttataaacagactgttttttcacatagctttcatacatcctgactttctatatctagtagggtaatacatttccttccaacctttagtggggtgaagttcatttgtcttctaatctaagaaaatacgttaactcctgacaacctctgacactcaacagaaacacaactgtactttggaattaatcatccatctttatttcatagtctccttatttatcaatgcaaatggaagtatagcaaatatttcacagtgtcatgtactacctaaggaatttcattgcaatagcattgttttgaaatgtatcatttgattttgatctaactatcatagatcagttttacccctgtatgttcagcctgaatgtctaaccacaatttcacaaaaatcaagggctctgttagttttcatacaaaattgtgatgacttattatgaagacagtcccaattaacaattgcatgtcatctgtaagaaatcaatttttttctcactccccacctgtaattttttttaagcaaagaagaatacttgggtctaggtttcaaggtttatttttctgtagtcctaatatcacttcagtaaattaatctgagactcatttttctaatatgtcaaatgactgttgtaaggattattataaaaacgtaaggtgattaacaaagtatgtaattgttccatagatggcagctcttgtttttttactgtgctttgcttctgccctgcttcacatattatgtaaaatagctggtgagttttaggaggtagtgctcacatgtttgcacagtgtttgctgtggacgatcaacagtaacagaagagcatacttcttcgatacacagagtttactgaatttggaaaggctttggcattcttatgtcatctgtaatgaaacaatctccagaagtcttttctaaaatgtccttgtaaaaagaaaaaagttatgtttatattttataaaaggatgatgttatttataaccagcagaagcagccttatttgaacatcttatgttgaaattgctacttaatacagtgactcataggagctttctagtggaaatcaaatgctcaaatgaaatagaatttagtttgttaggcaatagtgatatgtcttttattggttggactctggaaaacacttgacaacgaatagtactttacccgaagggcacgtatcatgcaccacatagcctaaccacaaacattaaaggtcttgtaactgtgagcctcaaatgaaaatacataaggacagctctcatacaatcaaatacaatacaaactagcttttaatttaaataaatatgtaagtaaagttcaagtgactataatgattttatatccctatgtatgtatcacagaaattgtggcaaactgtagaaatctattcaaatggaaagtaacaaagcactttcacattgccttgtattcaaaatccctactcttcataaaaacttatatttctttaacaaagctacttttctgtttaactcccggaaaacttcgtatttataacttaagggggtttctccaaccaaacaatttatttttgctaggtactatagctatattttttatacaaaatttgtgacagcaaatgaaattctaatcccaatagaagaacaaacaattttcatgtttcgatcttcatatatataattcaagaggaaatatgcttaactttgtagatttttacattttaaattgcattgtgtctgtatcaagtctactatcttttacctagattgtctggaagatttaagctcaaggttacggtttgagaaaagggttttgagagtgaccaggatagatttaagaattcattttatactaaaatatggccataaatatttttaaatacattcaaatagccctttgctggcacattttttcccttctttgccaaaacattcccacaggcggcctaagtcacctcattttataggtttagtaggtttagcaggctttatgtgctctagtagggttagtaggttttgttcatatcaggtctctctcatgggagtttccagggacaaggattgcttcagttagtatggccttagccatactagggtatttgctttaattctacagaagttttctaattaatattctgtagcaaaagaactaagatctggaattccccctcttaatctcttcctagaaatgagattcagaaaggacaggactgcatccagcctgtttgggaactcagacaaatgtgtgttgtcacagacacaaatagaggtctactatgaaataattggcttgctagtgtgctaatgacagacaatgctgatttgctccaacctcatacagtttcacacataaggacaatcatctatgtttcatgaaagttctatctactttaacattattttgaagtgattggtggtggtatgaattaacagtttaaatttaaatcctaaaattcagtgtgaattttttataatagcataaaaattcaaagatgtccatacaagaaaaattaaaatttggttaggtttagcagagtttgagaatccttactaccctcccacatagtattgtaatgtgaatataggcagttactattacaggcataatgatgattatgtattaagcagaaagaagtatcaccaccagtttttttctttgaatgcccctcagtacttctgcatttataggatggtagactggtttggtttagctctcaaaagtgaaaacatttaaagtttcctcattgggtgaaaaaaattaaaaagagtgagagactgaaaactgcagcccacctacgtttaatcattaatagtgagcccttcagtgaacttaggtcctgattttggagtttggagtctgacctttccccaaagataaacatgattgttgcaggttctgaagagggtcactccctcactggctgccattgaaagagtccacttctcagtgactcctagctgggcactggatgcagttgaggattgctggtcaatatg

SEQ ID NO: 11957 - DNA, 4501 bp, Homo sapiens
gagacataaccattgtacctgcctcctaggctgtgaggattcactgagatgatcttatagtgcttgcaacaatgtctggcacataggaaaagtgatcactaaatgttagccacgtcttactcctgcaaggctcacctccctggaacccatcggtcccaaccctgctcctgaatcaggcacagtccagcttgcagcgggagcaaaggtcagtactcagtgcccctgtcccttccccaggccagaggggaggaggagactgagtcacgaatgacacctcagccgcagtttgacctccaggacttacagtcctagcagccggtgccactagcatgtgagaggtccagaggcgcttctgtctcacccgcccgcctgggtgcacccatgctgggagcgcctgcaccatttgagcatgtccgagagcatccaccagagtgtgtgtggattcacagaagtgtgcaaatcactaagaaccaagggactggcacagcccatgcgtgcacccacgctcgcgaggggacctgctgcctttcaacgtggcggggacgtgacctgttaatgaatgtatttacttcccaaagtctgagggtacgttttgcatcaatctgtagatggatttgttttggggagcagggagagaatgagagccccctgtgctcagtcttagagggtgcaagtagctgatgggaagagcagactgccttccagccaggcctggtcctgtgagtcagggacgtccatcttagtgggcatgaaaggcctgtgtgatctcgagggagacatcgcctctccaagcctctccttatctgtgcaacaggcagacttaatgattggtgaggcaatgaggctgatagctcagcattagctacagccacccctcctggccaaccacacagggatcaaaccaggggtcagtccagaggtcagagtcaggagcagacaactcagatccagccagggacaggcaggtcacacggacatgtgcctcacgtatgcttcaaggggccctcccccgggcagaactgaaggacagctcctgttgccataggagggagctgggtgagatactaggaggaacttccggcatgatgatgtgtgatgaacaagggcctctggccaacaggtctgaatcagggctgcccagcccagcctggtgggaagggcatggagcatgggggctcatgtactaaacctcacctggacacaaggtgaaacagcccaaccccagaggaccatttttggccccggatggtcaaatcccctcttcctcccatctaccactggcttctccctggagcagtcttcatcccaggggagccatgatgggagagaggggcagcgcaggctggccaccaagagatcccctgccggggtgcaggttggactgttggtgaggggccacaggtattctcaggtaccaagcccttggaaggagacaaggtaccaggcttcctggaggtgtgctacatctagctcagcaccctgccaggtctctctacccacatgtcctgacctccctgggtccgttgccatgcgggagagagaggccaggctcctccagaccctctgcagagatggaaaggcttggagggtctggggccacgggaccccgccagcccattctagcacacccgggcccatagaccttgttgcctgcccctgcctggatctgggtccccactgtgcctttgcctctggggctatggagcaggccgcagcagaagaggaaagggcatccccaataccaaatcctccagtgaccacttcttcaccttctaccccaccaccaaagtctgcaggagacttgagacaggtttgttctgggcgtgtgactgatgcctctataggggtctcagtgctctaagccgtctggtatttgcctggggtgtgtgaagacctggattaaggttcccagccttactactaatgggctgtgcacttggagcccttagagccttaggtttctaacctataaaatggacttaacgtctacttcacagggttctatttgcattttaacagaaaacaaagtcttaagtcaaaggaatgaatctctctctctctctctctctctcttttttagaccaagtctagctctgtcactggagtgcaatggtgcgatctctgctcactgcaacctccacctccggggttcaagcaattctcgtgcctcagcctcctgagtagctgggactacaggcgtgcatcaccatgctcggctaattttttgtatttttagtagagactgggtttcgccatgttgcccaggctggtctcgaactcctggcctcagatatccgtccgtcccagcctcccaaagtgctgggattacaggcatgagccactgtgcccagccaggaatggatcgctaatagaggaattccaagtctcacccaccgataaagaattctgagggcagagccgggccactttctcaggcctctgatttcatactgtggtgttagttacttctgagaggacagcttgctgccagagctctattttttatgttagaggctccttctgcctgcagactctgctgtctgggaagggcacagcgttaggagggagagggaggtgtgagtccctccatggacccgctgctttgtacttctctatctcatttccttttcagcaccactctgggcaatcagtattccagccccattttatcctcagaaaattgaggctctgagatgttatctctgtgacctgggtcctattacgtgccaaaggcatcatttaagcctaagatgtcctggctccaaggtgtcagcatctggaagacaggcgccctcatcctgccatccctgctgcggcttcactgtgggcccaggggacatctcagccccgagaagggtcagcggcccctcctggaccaccgactccccgcagaactcctctgtgccctctcctcaccagaccttgttcctcccagttgctcccacagccagggggcagtgagggctgctcttcccccagccccactgaggaacccaggaaggtgaacgagagaatcagtcctggtgggggctggggagggccccagacatgagaccagctcctcccccaggggatgttatcagtgggtccagagggcaaaatagggagcctggtggagggaggggcaaaggcctcgggctctgagcggccttggcccttctccaccaacccctgccctacactaagggggaggcagcggggggcacacagggtgggggcgggtggggggctgctgggtgagcagcactcgcctgcctggattgaaacccagagatggaggtgctgggaggggctgtgagagctcagccctgtaaccaggccttgccggagccactgatgcctggtcttctgtgcctttactccaaacaccccccagcccaagccacccacttgttctcaagtctgaagaagcccctcacccctctactccaggctgtgttcagggcttggggctggtggagggaggggcctgaaattccagtgtgaaaggctgagatgggcccgaggcccctggcctatgtccaagccatttcccctctcaccagcctctccctggggagccagtcagctaggaaggaatgagggctccccaggcccacccccagttcctgagctcatctgggctgcagggctggcgggacagcagcgtggactcagtctcctagggatttcccaactctcccgcccgcttgctgcatctggacaccctgcctcaggccctcatctccactggtcagcaggtgacctttgcccagcgccctgggtcctcagtgcctgctgccctggagatgatataaaacaggtcagaaccctcctgcctgtctgctcagttcatccctagaggcagctgctccaggtaatgccctctggggaggggaaagaggaggggaggaggatgaagaggggcaagaggagctccctgcccagcccagccagcaagcctggagaagcacttgctagagctaaggaagcctcggagctggacgggtgccccccacccctcatcataacctgaagaacatggaggcccgggaggggtgtcacttgcccaaagctacacagggggtggggctggaagtggctccaagtgcaggttcccccctcattcttcaggcttagggctggaggaagccttagacagcccagtcctaccccagacagggaaactgaggcctggagagggccagaaatcacccaaagacacacagcatgttggctggactggacggagatcagtccagaccgcaggtgccttgatgttcagtctggtgggttttctgctccatcccacccacctccctttgggcctcgatccctcgcccctcaccagtcccccttctgagagcccgtattagcagggagccggcccctactccttctggcagacccagctaaggttctaccttaggggccacgccacctccccagggaggggtccagaggcatggggacctggggtgcccctcacaggacacttccttgcaggaacagaggtgccatg

SEQ ID NO: 11958 - DNA, 4076 bp, Homo sapiens
tgcatatgaaagaaacctattcacatggaccatattacattataatcacagtgtttactgcttgactaccatctgcctggcctagcaagggtgtcagtgaggaagagaggacaaggggtaccaatctgtgaactacacatggttcttgctctcccagcttctctctcccattggcaaggcaacaggtaaacacatgaaaaatcaaataatgctataagagaaaaatgtattcaggacaacaacaggtttgtatgaaggcctttcatcatcgttgtcctacctagaaactgaatgacagggaatcagagtcacaagctatgaagtctaactgggctgttcccagagaaagattcagtgcagtaggtggggctgcagccagccctgggtgggtggaaggatgacatccacataggcaagagggtgataattcacttacgcagctcctcactgcacattgaaccctgctgacttctggcttctctcccgggaggaactgcgactcaacattctgaccttatctcttgggtagcagaatgatggagaaggaaagtttctttttgcttctcgcaggggttaatcatccatctggaatgcctacatttggttgacaatggctcaccctatcatcttcctcctgaaccattcacctaaatgtgccatttctttcctgatagttctcatttgtgtgtgtgtgtgtgtgtgtgtgtgtgtgcacgtgctcacacatgcatgctgtcactgggtaaacaggccaccctgggcacagttccatctacaatgtttgaagtttactttccagcttctgggcatcatttgcaattataatgctgtcataggcagaaacgagataggctaattaatcgttgtcaatactgatccctatttgccagatgagattttggagcagcatggctgggaataattggtatagactgtatttccttgctttatgtcactggaaatatttatttaagcatcacggtcgctatgcataaatatcctggaaaatggggtatagctgaatggtgcagattcattcattcatattcagcaaattatgttctaagcacctacttcagtatgtgaacagcactaaactcagaatattggtctgctggggtcctttattagcttccatgattccctgaacttggccaagacccttctggtcggctgcagataggcacaatggatagttttgcttctagataatgtaactgggacattcagcattatctatcgccttgaaattcctctagtcaggtggctttctaatgggtacccagagccctatgactacccagattgatggtgcacccaacaggactttgcatttatgagctgataagtcacagtcactagctgagattaatctgtgtgacaccagaatgtgtctctatctaaaggaaaagggatgaagggtgatatctttggtcacaagtaatgtatttccatgtagtctttgacaaaggatctaagtggattttgtaattgaagaaaaatctatgcactaatctttacagcatttccgtgagtgtacgcaagtcagctcaacaattcaacatttgctctgtggggttgtgctagaccctgtcaggggataactactgctggctggggcccagttcagggaagacttgccaaagaccatcaggaaaagagggaagctgagtcttaggtttcttcctttagagatggtgacagtcctctcaccacctccaagcatctcacaatgtttccctgcctccaagtcatcaaattcatttttgattcctacttcataaaaattacattctcccagcactttgggaggccaaggcgggcagatcatgaggtcaggagttcaagaccagcctgatcaacatggtgaaacaccgtctctactaaaaatacaaaaattagctgggcatagtggcactcacctgttatctcagttacttgggaggctaaggcaggagaatcgcttaaacccgggaggcagaggttgcagtgagccgagattgtaccactacactccagcctgggtgacagagggagactccatctcaaataaataaattaaaaaaaaaaatatatatatatatgtatatattctctatggatgctgaccattggaccctggtttcatctgcacgtaacagagtaagcttggacttgtgcttgtaaattaaagctcgacacctccttttggcttctctatacctgaatattcttactcactctccttaatgtgaatatgcatggaagcaggaccatttcctcaaacactagcagcagcgaaccctgtggaaagtcagtccacatagaataattcaaataaagtgttcagagaaatggggtttcagagcaattactttttccagacctttcacaaatcagtggtgtaggtatgaccagccttgagttgagacctctgtaatatccatctttaataacattaatatgctgtggatgagcaactgatcactggagggagtttagctgcccataggagttcatggctaatgacaatatctgaataaggacaggtgtggagcccaggtgcaggaagcaggcgaaggtctttctgtgagtctcctctgagggaactgggtctttatacatagttactgtttcagaattgatccttctggaatcatcagtcttcaccagtagcttgttacatctggggttatctcataattcaaacaaagctgacaagttgtaacaatgagcacacactgacttctgcaacaggcgctgtccacttcccatccgcactctaccggcttgctcctggccgcctcccactcgccttcctgggtggtcccccagcagttatacctacctggttgtcgccccctctatcctaccacaattgctcactagcggtttcctgcgtacacagcttgtctccctaaccagagtggaggtgccttggggacacagccaggctcagacattcactcagctcatcatagtgccatcccatcaataaccccttctgagtgatcctgggttagtaaaccgagtgtccctgaaattccactaccgctgattccctccagctgggcagaggcagcgagcgctggctgaagcttccggtgggaaatgggcagtgcctagaagagaaggaaacgatgcatgagaaggttccagatgtctatgaggaacatgacgtgtcctgtccactactctgcttttcctcgtccgcctccccaccactggaggaaacctagaagctggtgcaggaaatcctcctctcaacaacccaagaacactttgcacaagaggggtgcgccctcggaggttgctcttccccagaggcctctcctcgctggggtttcttgaagacagatacttggactcctgctgggaccaggcaggccacccatcctcaggggcagtgactggtcactcaccagacctccctgcatcccccttctctctcctcccccagcacgggctgaaccccgcagccacagattctgatcaggattagggtgtgggtgcaaatccaaggtccaccaaaatggaaaagaagtaaccgatgggaacacgtctccaccaagacagcgctcaggactggttctcctcgtggctcccaattcagtccaggagaagcagagattttgtccccatggtgggtcatctgaagaaggcacccctggtcagggcaggcttctcagaccctgaggcgctggccatggccccactgagacacaggaagggccgcgccagagcactgaagacgcttggggaagggaacccacctgggacccagcccctggtggctgcggctgcatcccaggtgggccccctccccgaggctcttcaaggctcaaagagaagccagtgtagaaaagcaaacaggtcaggcccgggaggcgccctttggaccttttgcaatcctggcgctcttgcagcctgggcttcctataaatggggtgcgggcgccggccgcgcattcccaccgggacctgcggggctgagtgcccttctcggttgctgccgctgaggagcccgcccagccagccagggccgcgaggccgaggccaggccgcagcccaggagccgccccaccgcagctggcgatg

SEQ ID NO: 11959 - DNA, 4502 bp, Homo sapiens
cactgttcaggacggccctcaggagcacagccatgcggatacaaacaagcattatgctggagaggaacaatgatgctatcaggttggtaccaagactgatacttcctatttaagaaatcatgttaattatataggtattaagttctggtttttgcaagacaacatcggtaacctcagagatgaacttctagtatgtaatagtattgatatcttcaaattcagggtagatgatctagagcttgataaactgggtctaaatctgagtctcaattaaatcctgattttatcaactccccaaggccttccagatggctctctattgcaaatcttctcctctctaaacatcacgtcttccttttaaatgtctgtttgacattgctccttgtgtgctggcccatttgcaaagtatcagcccctacatttaaaatccaagagaattctctccaacgactcatttattctctctatattaagtgaagatcaagagagtagtcttgcctggtgatgtgcacagcattaatcaaaatggctccaatctttttgaacagccaccatcttttattaactttaagcagaaacaatggcatgatgcctcctcctatactgagacctttgttacttttataaaatggctatagaatataaatttaaaatatattaatctctcaatggtaaccttactacctaagcaaaaattaaaatttatttattttatcttttagcaagccttaattttccaccacactgagacaaaagactcaaaaatactctctccaggacacaaaaggaaaaatttttctttccatcccttacattattctctattgcaagtagaaagaaatactgtttaatggcctaataatttcaaggagccttgaaaatcatttctctaaatcaagaagggcagaaacattttaccactatcatcccttcaaatgcatgtttgtctcctggaaatctttccctgtctccagttgcatacttgcccccacccattgaagctctgaactcacaacatgcagttccccattgcttatggtgatctgtttcaagccctcagagaagcaagattgataaacctggaagacaatcactaacaaaataatcatccctaatttactactcccatttgttctttactatattcatctccagaaaatcatagatgatcaaaagattacctggtgcaaaactcattttataagacaggaaactaagcctcaaagaggtgaggtacccaagggcatgggtagttagtggcagattcacagtgaaaacaaaggtgtcctctcattcagtgttctaggcactctaatgcccagtccagcatgcactccacctcaacggtctcggattgaaacctgagtcagctggctctgcagacaaatgcagaggaagagccctgcccactgtgaacacactcttacacttccagctgctcctccaggagccacaggcttccagctcaagcaaacgtctgggaaatcagccatactcaaggctgcacacacccagctccaaccaccatgtcaaaatgatccttttaacacttctgtgaaaacccattttgtttccccattttattttaaagcatttcaaagcatagcacacaggctgaattacataggcacaggaggcaagactagggaaaacagctagagtcagcttctccccctgcaacttcaatcaaaatagttcacagtaagcacattctcccctccttcttccttgccagaaagcaacaacaaggaatcctccactccagggtgatcctgaataggctatagcctcatcacactaagttcaaaaggatcagaatgcagagccaaggcactagacaactcagtagggttattgagatgcaggtaggttctaagaagaatatagaaaattctgaacttctcaaataacattactcatactgtcaattaatcaaaatgttgaacagctattacttactagacactatgctaagtgctacaaagaccaataagactacttgtcttcaggtagcttgtagtctagcaagaaatgagctacaaagaaaacaagaaagtcagtatgtaaatgaatggcatgcaatacactagaaatatgcatgaacagccctgtatcagagaagaacaagcaacacaaaagcagtctgtgaagacccatgttgtataaagggccacattaggcaccataggagtcacaaagttgaagaacatactagccttgaaggctgacagtaaaatctaaacatggaaataaacacatatcttacccatagcttttaaagccaaatgaaacacattacaaaatgaaagaaaagttactagagaggtaggtgtaagctacatgtgatggatggaactatttatttcaactgaggtaatcaggccagacctgtgagatacatttaaacaggattttgaaggacaagtagcattttgataacctgaggatggggaagggcatttcagaaacaataccttaacaaagggtgggtaagctttgaaagaaggcctggagaaaaatcaggaccccatcatcccaggtcctggagcatggtggggggtaaggctagaaaggaagttgtacgaactcaaatattaattcaaatgctaagaggcttacccttcattctgtatgcaagctaatggcagaagaaaaggcacaattagagccatgctttgagaatcattattgaaagcatgtcgaagatggtctgaaggaagcaattgggaaaagcaagcatagctcatccaagtgggtgagagtgtgagttagaggaagcttggaaattggtgatgtgagagatgctgcagcttctgggattgctgcctggtcgtgtgtagaggaggggcagtagggctcattctgaatcttgtcttgaaaagcacatagatagtgatgccaaaaccaggactacggaaatcacttgaagctgtatcctacctcctcctccatctgtatctgcttcacctatcaaggatatctactattgccactaaaattcaggtgcttatggcctccctcattcatcagccagggtttatctggccaggaaagagaagccccttcaggcatttgcaacagagggagtttaagtcagagaactagtcaccctggtagttgagattgccatcagcaagaagctgttaccatttgaaggctgcagggacaaagggagtgagcagtcctctgggagactgaggaaggaagctcctggcttctccccactttccactttccacttcccacttttactcatctgtcctccaattcccttttggctgagcctagctgaaacccagctgacaggggagtttgagcaagcagcctccagggtcagccctctgagttacaggtagagcaggacagggaggaatggatctcaggacaaacaggttcaggatccggcaaactaattttacactccagccattgagttggaactactggccagcctccccccgagttagcatgtagaatatgggataccagctgagtgcctgagagttatcattcacctcagtgggggtaggggcggagaagggtgacatatagccagccacatctatatccactggcccttccttgtcctagtcctctgtattcctgagaaggaactattctcaaggacctgagtccaagttcatcttacttagagtacagagaaaagaaccgctaactccttctctctttcccccatcatgtctcctctcctttctagttctcatcactctctactcccccctgccccccttttctccatctccatcacctttgtccagtctctatccccattttcaattccttcctcaaaacaccaagttgcttggtagcatgcagggttggaacatgcctttaacagaaaatctcgtgtctcttgaacctagttatttattccttgagcagagtagatattcaacaaaagaattgttaaattcaattaaataggatatatcttattattaaatatttttttcattttttgtttacttatatgatgggaacttgagtagtttccggaattgtctccacaacacctggccaaggaatctgtgaggaaaagaaagatcaaatggaaaatcaaggtacatgacaccagaagacctacatgttacttcaaactttttcttcctcatgaaccattaaaatagagcataactcttctggcagctgtacatatgttcataaatacatgatattgacccatagcatagcagctctgctcagcttctaacaagtaagaatgaaaagaggacatggtctttaggaacatgaatttctgcccttcccattttccttcagaaggagagattcttctatgacctcattgggggcggaaattttaaccaaaatggtgtcacccctgaacccactgcgacacgccacgtaagtgaccacagaaggagaaaagccctataaaaagagagacgatagcgctacattttgtccatctcatagcaggcacaaactcatccatccccagttgattggaagaaacaacgatg

SEQ ID NO: 11960 - DNA, 4504 bp, Homo sapiens
taagcttgcttgacgcagggtagtcacaaaccttcaatttgcaaaattgctatctctgcacagcacagtagggcaaagtgtgaataaaatgaggtaacctgtacctccagctaaagtcccagaattaactttccttggctccagtggattcacaagccggtatctgaatcatcacctcaccaagatgcctggatctgccttttagcccagcttgggtcacattgccactgtggagccaggaggtgggtcacatctgctgaattcagacctagagttggggagaagtagcttcccaatgggaaactaaggggcagctactaaaagtaggaggacagggtcttgggaaggcttacatggcacacggccactacctccctcaatgctctgtcccctgcttagtgtcccgcactgtaatttctgcctcttcatcaataaaacaccaccttaatgccactgtaccccagcaccaaaaacagtgttcatcaaaaacttcccgaataaatgacagaattcatgtcatatcgcgacgtcttctaatcacagcctgcgtagttttctggggctgctgtaaaaaagcactacagactgggtggcttacaacagaaatttattctctcagagctctgagactagaagtccaaaaccaacatgtcagcagggccacgctccctctgaagcctctgggggaagaattccttcttgtctcttctagcttctgggttgcaggcaactccttgggttgcaggcattgctccaatttctgcctccatggtcacatggagttcttcttgctgtgtgtctctgtgtccaaagttttgtcttcttatcatgacaacaggctttggattagagcccactcatcttaacttgattgtatctgcaaagaccctatttccatgtgagggcacagtcacaggcattgggacttgaacatatctttttggcaacacaattatatccactaaacagcatttttgcatctatattaagaatgactaaaagatgctgcagtaacaaacatatcccaaaagctccatggttcgttgcctaagagtttgtttttcacttacgaagtctgtagtgggtctggttgctttcattttacgactttgctagatcaacacagggctcccagggttaccgtggcaggggaagagagatatacaggagtgcacaggggccctggagcatattgcatgtgctcaccaacaagcccattatcatcagatactgcctgttctctcctcgtcccctgggccattctaggccccaagtgagggttcttggatctcacacaagaaggaatttgaggcaagtccataaagtgaaagcaagtttattaagaaagtaagggaataaaagaatggctatttcatcggcagatcagccccaaaagctgctggttgcccatttttatggttatttcttgattatatgctaaacaaggggtaaattattcatgcttctgccttttaggccgtataggataacttcctgacgttgccatggcatatgtaaacagtcgtggcgctggtgggagtgtggcagtaaggctgaccagaggtttttctcatcatcatcttggttttggtgggtcttggccagcttctttactgcaacctgttttatcagcaaggtctttatgacctgtatcttgtgccagcctcctatctcatttcgtgattaggattgccttaatttactggtaatgcaggccagcaggtcttagtctaacccctattcaagatggagttgctctggttccaatgcctctgacatagtcattgctgggcacagaagcctctctctcactgagtgctgcttctgcagccattgccatctctgaatgggcaccaagccccacactggaaaccgatacccttggaatgccaaaaccacagaggctgtgaagaggtacagtcaaagctgccctctgccagaggagctccaaagcatgttatgcagactccagagactttctgaaaaggttaaaactcaaattgggcaagtgtaaatgaacaacacctagtgaagggagtcacatacaaggcaatacaatagagagtggtgaggactgtggcaaaccaaagtatgtgcctcatctaaagggagcagtcactactcaacttcagcaaattattgccatatggaaactggcatccagtattgccagatttttgggaaatttttttaaaaaaagaaaaccagaaagtcagatttttacatgaagtttcccaaatttcaaaatgctgttcaggctggatttagcccacaggccacgagtttgcagcccctgctttagtgagataactttttccattttcactctcagctctcagctctccaacttggctctctggctatccacaggacgtggacatgagcccagtggggctgggccaggaggcaatcccccttcccaactgacctcagtctcgccctctccaaaacagccaaggtttgtcactgggtcaggctgaagggcctggctccctcctgcggggcaaggtccctcccaagagggtcctttaaaactgactctggaaagtcagagcacacacccaccagacaagcctgaacttgtctgaagcccactgagacccaagccgcagagacttttctagctgtgatgatcaagacataatcgtgacctccaatgccccccacaagtatattgctcctgattctttcagcccctgaccttacttctcaaactgttccctgctgacccccagtcctatctgcccccttcctaggctggtccttactgacccctccagctccatcccctcaccctgtgccccacctttttcagatagaaaaaactttcttctccagtgcctcttgctgtttttcatctctgggccattgtcaatgttccctaaaacattccccatattccccacccagcactccacctctttagctcttcaggtctcagctcagaagtcacttcttccaggaagccttccttgattgtctttactagtttaggggctgaagtcaggcgttcccaacagcctgctggagttccccatcacagcttatctctcaactgtctttcctgagagagggagaagacattcctcagagacggttgtcacagggagaacttcaaaattgggattcgacctgagaggccacatggattcttggcttggcgcaggaaaggattcaagagtgagtggggaattcgtggaactgagggctcctcccctttttagaccatatagggtaaacctccccacattgccatggcatttataaactgccatggcactggtgggtgcttcctttaacatgctaatgcattataattagcgtaaaatgagcagtgaggatgaccagaggtcgctttctttgccatcttggttttggctggcttcttcactgcatactgttttatcagtggggtctttgtgacctctatcttattaaaccagtcttgcccaatttctatctcatcctgtgaccgagaatgcggaccctcctgggagtgcagcccagcaggtctcagcctcattttacccagccccctgttcaagatggagtcgctctggttccaacgtctctaacgcggggcccctgactgctctatttcccaaggtgtatctagcatctcgcactatacgaggccaagttaaggcttacacatttgcagaaggaaagaggtaaggaagcaacctgggaccttccactgtctctgtttccatctctctctttccatctctgttcatcccagaatctctctgtccctatccctaaatatcgaaaatttctgtctctgaccatctatcattgtggctgatcatctgtttctgaccattccttcccgttcctgaccccagggagtgcagggtgtcctagccaagccggcgtccctcctagtagtaccgctgctctctaacctcaggacgtcaagggcctagagcgacagatgtttcccagcagggggttctgaggctgtgcgcccagatcgcgagagaggcaagtggggtgacgaggtcgtgcactgagggtggacgtagaggccaggagtagcaggcggccggggaaaagaggtggagaaaggaaaaaagaggagaaaagtggaggagggcgagtaggggggtggggcagagaggggcgggcccgagtgcgccccccgcccccagccccgctctgccagctccctcccagcccagccggctacatctggcggctgccctcccttgtttccgctgcatccagacttcctcaggcggtggctggaggctgcgcatctggggctttaaacatacaaagggattgccaggacctgcggcggcggcggcggcggcgggggctggggcgcgggggccggaccatgagccgctgagccgggcaaaccccaggccaccgagccagcggaccctcggagcgcagccctgcgccgcggagcaggctccaaccaggcggcgaggcggccacacgcaccgagccagcgacccccgggcgacgcgcggggccagggagcgctacgatg

SEQ ID NO: 11961 - DNA, 4506 bp, Homo sapiens
taccactcaaaagttatgggactttggggaagttatttagattttgtgtgcatccatgtcctcatctgtaaaatgaggataataatagtacgaatgttctggggataaaaggagatagcacgtgcaagtgctgagaaaaaaacgtcatgatcaataagagtattcaatagacatgaactagtagtagtaatattctctaatctaaaaatgctagtgaaaaaacaatatgtgttaacaagttatgttagtctataggtgcttacacattctatttatactatttaaacagtcttcttgttggttaaccacttctaaaaagatgtagtatttccctatttaaatgacaatgaagcactgatttatcttctgagtctttgtgtcctcagcactcaaagaaatgggttgtgtctctgttctgtttcttttctaaccccattttgatagttaaccctttgggtctccaaggagcacttgccctaattatgataggataatgaaacactgacatctaattataacatttatgaaggtagtagatgccaattacaaactaggaggcatgtggctttatattcttccttatgtaacaattgtggttttagaaaagagatcagattcaaaaaatagtttgagctatatcatttcccactgatgctatattatgccacttcttccagatctataactatgtgatagttattttgagctttgaagacctcaggactctttctagcttggaactcaaaaatctctttgacgatgggtattttgttgaatcctttcatttaagcaagtccctggaggaagagcttttaacccaggcactatataaataatcatcggattaatagaccccgattaaaaaaaaactgtaaacaaattaatattttgaacacagtccttgtagagtgaaattgtgttcttttgagatatgtgtaacaaagtactttgaggatgtgaacatcattaatattttagccttaattattttaccctcacaaccttaagtgtcccccaacagcaaatcagtgaaatgtcaattataattttaaaaaaaatttatcactttggaataaaactttaggaagtatcacaaagaagcaatgtaaggtggtaacactgggtcctgttaaaatcttgggcaagttatccagtttttctaggctgtttcctaatcatcaaaatgagttttggtatggatcagatgaaataatgcattaaaatcactttgtagataacagtaaacaataaatgtttattgaatctgaggaatcaaatgggtaggatgttaggagctgttaggctctctagaagcaaatttttactttaaagagtataaaatcaggcttatgtttactgcacttgtatccttattccccttgtaacttgtccttaaataatttgtcatggcttttggttaataaacacatctctctttcatctccccaccataaaataaaaagataacatccttatgctctcagcatggtcttaccttcagactctagaaatacatagctggatgtgttttctgggaaaacatataaattaaaatcatttttggcaggtaaacattggctactaataaatagttctagtaagctctcctccttataacctaaggatttatgttatagctcacttatccagtgggcttaccagaatgcagtcatattccaaagtcagccttacaaggtccctctctggaaagaactcagttgatgagcctctactctcctaattgctgcccttacatttttacatgacaaatcatcatcctttctggttttgcagcattttaatagacccagagttgctttctgagaaaagtctcagtactaacaaaggttagaactaacaaaggttgaactaaggatgacatgcatgtggtatgtgccctttccagtcctcttcccaggtccatgaagaaatcaccaaccagtgagaacactctttctacagaacacaaactcagcttcaggctatttctgaacaagagctttaggaagcaaaaggaaacaagtatgtaagaacattaagaacatacctgccatacttatactagaatgtaagttccttaagggcacagactgtgtctgattcatttttgttttctcaacaaaaatgttgatggggtgttaactaattgtataaagtaggaataagagtcagtttcgtaaatgttttttaaaagttgacaaaagtattttcattttgattccaaaattaaaaaaagctaataaagatattacaatattttaaaaatccaaattttatgagagttcttgtctggatgaaaattagaatacattcacattatctcaaacgaatgaacatgtgtgactttataaaaacaatacctccctaaaccatgaattcagatggaaaaactcgacatctttatttctgcagtcagtctcatttttcttaaaacagttcaaactagtaagaattttccagaagttacagcttgactcacccaaccttccaaggaaaaaacaaaaaaacttaaacagacattgtttcactctcatcatttcccacccttactaatagtggcaacttaagtgtatcttaaagcactccaacctcttcatagagcctattaaatgagtatcttgtggacacccacacacagtcatagaatcctaagtggtgctcagaccagtcacatgtcagtgcattcttaattgctagagctaacatgctctcagcatggtcttttaattacaccctaataatttattatagtttctctctacaatgtaaagtcttggaaatcacccactaaaaagtgcctgtgtactctggggctttggcaggctagggcagaacttctgagaacacggtgtgttccagagaagacaatcaatctgagaggacttacacagaaacagttcattcaggacctggctgctggcttttatctgagatctgaggatttcacaatcacttggagatacctacaagtgtatagcacaccttggatattactcttaatgattacttcattttgtaaagaggtgactccaccaacagcaaaggagagggcccagccccagccaccaggaatacagttctctgccagtaagtgcctaatgactcattttcctcaacagaattttcataaggctggaattcagggagggatgtctggagaatgtctgaaaggaagttcacaagccactgtcctgctctttgctggagaaagtgtcccgtggtagccagagaagttgactaaggcaaacagcaacatgttttggtaacatttccccattacctttcatgtacaatccaagaaaggttgccatgaagtgttttaatcaggttgggaacattataaacttcgaaaaaagaaaaccattagtggaaaaattaaggacacagtagatttaacaactgtgtttacgtggaaccacaaaatctatccaagtgaattgcattaaaacagacagaacactccaagaaactgttgtatgtgtattttttttaattcagtcaaccattttactaatctgtcaagatgaccaatttctttggaattatgtagatttagccaaaatgaaattatacataagatttacttttcttttcagatgcttttttatttatttttaaatctttataattactagatgttctcctctctcagaagatattctgagaggaaagcaaaaataccactcttgtaaagccatttccattcttccaaaggtctgctggtaaattattcttactgatctttccatctttctagcctgtgcatacacacctaacccatactaaatttcaccagatggcattttatttctttaaagtaaagcagccgtgggtttagacagttgaatttttaaacttctgtatttactgaaagtgcatatggtgctatatggacaaagaaattgtgctgaaagaaaaacatttctgtctgcaatacctcataatcttccagaggaaaaaaaagtgcagttatatggcacatttctcacaaaatcttatgtggcttcaatgttcttcctctgttaaaaagtagatatatgtttaatgtacagacctgcaagtttcattattttaaattcatcttttagtggcaaataaaaatgttatgcaaaacccaatgacttgctaaagtgatccttcagtgaattctagaagaaaatgcaacataaacctgaactggtaaaaaagaaaaaataaaaacctctgtatgtcaacgtaagcagatgttggtgtagttacaaggatgagaaggctataaaacttcccttgagtcactcacagttcatttgagggccaagaacgcccccaaaatctgtttctaattttacagaaatcttttgaaacttggcacggtattcaaaagtccgtggaaagaaaaaaaccttgtcctggcttcagcttccaactacaaagacagacttggtccttttcaacggttttcacagatccagtgacccacgctctgaagacagaattagctaactttcaaaaacatctggaaaaatg

SEQ ID NO: 11962 - DNA, 4501 bp, Homo sapiens
gtcaggctggtcttgactcctgacctcaggtgatccactcaccttggcctcccaaagcgctgggattatggcatgagccactgagtctggctgaatgttagctctcttgatgctgtcccataaatcttgtaggctttcatcatttcttttcattcttttttctcctctcactgtatattttcaaaaacctgtcttcagttcacagattctttcttctgcttgatcaagtctgctactggtgatttctactgcatttctcacttcattcattatatttttcagctccaatttcttttatgatttcaatctttctgttacatttcttatgttgtgcatttattgtttctctgatttcaccaaattgtttctctgtgtttgcttcaaagtaactgagcttctttaaaaacaattatcttgaatccattgtcaggccatttgtagtactccatttcttttgggtcagctactgggaaattattgtgtttcttaggtggtgatattttaatttgggttttcatgtttcttgctgccttacactgctgtctgagcatctggtggatctgccccaatttcaggctgtatgggctgactttggtggagaaataccttcttatgtggaataatgcgaggatgctggctgggtgggatgcaaaagttctgacttcagtaggggcaaagctgtgtggtctccatgcagatctgtcagctgaggttggtgttagtgaatactacagggatccttagaggccaacactgtgggtatctacagtggcaatgaggctgttgaggttttcaattgtgacaagtcctccatatctctttttttccccacctgggaagtcatgactgaggacatccctcttggaattaggtctaacttgcaggcctgctcctggtggtggtgacactggtgtctgatgaacagtgcccatggagtggccaagagccaaggcctgaagcatgggcatgcatggagggaccacagcaccagattcaattgtagcaatggtaccagtgcccaaggcacaggcatacttactatcacattgataatggtgtgtaaaatgcaggtacttataaagcagctaaggagccagggactttactgcatgcatacgcagagctacagtggctccaggatccagggtgtgggctagctctccttggtggctgagctggtgactagagcatggacaggcacagagaaaccttgactctaggacccagggtgttcactagctcactatagtggtggctctggtgttggaggtgtgggtgtgtgtagtacagcctcagagacagggtctggagcgcaggtgtgcacattactacagcagctctggagttgagaatatgggttacctttctacagtggctgaactagtgtctggagcaaagactttcacagagagaacttggcttggggtcccagggtgagatctagttcacaacagcagtgactccagtgtctgagacatgaggaggtgcactgcagccacagagccacagtccagagtgtgaatatctgtagagcagccacaacttttggggatcaggaacacacatagacttgtgagaggtggtaaccctggccccagtcctggggcagtgcaacaatagctgcttcttggtgagggggtgtgaggggtagtgcaactgtgtttccctttttagcatcctgctatgggaatggctgttggataaaagatgccagtgtcctctgtggagcaggacactgggggcctcagtggctctgtgtcacatgactgacacagatagcctacaaatttctttattcgtagctatctcctggtgtctcatatatgccagtctcaccggtgattcttctacatggatattctttcttttctccattgtgttgttccaaattctttaacaggctcttgagccccatcccccaactccccacccttgtgagggctattttggtttgtgtataactgtctatgtttgtttttttgttggggcataaggctgacatctcctactccaccatcttgctaatgtcacctgcataggaatctttttatgctttccttatattcactaaaatttaacaatatcaaacttaaaaacatatgatcaattgaacttattaatatcaaacttattataaataagaaactaccaggctgggcatggtggctcatgcctgtaatcccaacattttgggaggctgaggtgaaaggatcacttgagcccaggaattcaagaccagcctgggaaatatagagagaccctatctctagagatttttttttttaattagccagtagtgatggcacacatctatagtcccagctactcaggaggctgaggtgggagaattgcttgagcccaggaggtcaaggctggagcaagcagtaatcatgccactgcactccagcctgggccgcagagtgagaccctgtctcaaaaaaagaacctactagtctacataccacacttcctcatccccatctgagactatatatattttttctaacatgaggcaatgccaaaaagaggggctggtgagtgaaagtaagaacagaaagacatggaggcaagtcttatagaataatagccaacacttaaacttacacttaacagcgtgataggtattgttccaaacacattaaattcatttaatggtccttacatgtctatgtatttggtgattattatccttattattcacattgctgagtgtattattctgttctcatgatgctgatagagacatacccgagactggataacttattaaaaaaaaaaaggtttaatggactcacagttccacgtggatggggagtcctcacaatcatggtagaaagcaaaagacacgtcttacatggcagcagggaagagagagaaatgagaaccaaacaaaaggggtttccccttataaaaccatcagctctcatgcgacttattcactaccatgagaacagtatgggggaaaccacccccatgattcaatgatctaccaggtgcctcccacaacctgtgggaattatgggagctacaattccagatgagatttgggtggggacacagccaaaccacatcactgaggaaactgagttatagggagattagtaacgcccaacacagctggtaggtggtggagccaggcagtctgactctagggtctggactctgaactgcatcatgctgccaagaagttcctcattttttcctctctctaagtttcccttattcccctacagtcattccttcaacagcatttccttcaccatcttttctacttctactatataattaattttttcttcttggtcccaaattccaacgtgcaaatgcagccttatataccctaattcatctttacctttagactttcttccaatgtttctacttcattccattttaaatttatccatgagatgcctatttacaagctgtaaccatcatgaagtgaatgaagaataatacctactactgtacaatagaattccaagagtataaataggagttatggctttctgacttgaaactaaatacttgatacttgattttgctgtctgagatcaatctgaaaagtaataataatcactaacatttgttgagcatcaattgtgggccaagtgtcatttcaatcactctgtacatattaactcatttcatcctacaacaacccggtgaggcaagttctgttattctgttttacagttgaggaaacagaggcatagagagcttaagtagtttgcccagtagatagccagaagaggagccaggatgggtctcgggcagtttaacagcacagctgaagtcttaaccactatgccaacagctttttggtcctacacatcccatgggaagaggaaaataaaaaggtatctatttgtatacctttttatttctgatataagaagcagaattcctttcacatgacctatgtctatttaatacgtcattttgaaacttaccaataaaatttcccaagcgccagaaaactgttagtggctttttccatttctctctatttttttttgtgctactaattttgcttctttccctcagaaggctgccggaatagtaaacattcactgacatgtcataattactggaaaatgggcactggaaaatcacattgtaattaattcaaagcatgttttccaaatgtactactttaaattggagcttatatcataatccaaggaaacctttgtgtgtgtactgttcccacattgctcagcctgggatatccaggagtaattcaccttgcgcctgcctccagaccatcttccatggaagggggtgaccccttgcctcttggcaaccactatttctaagctgccaacattactcttgcattatcaacattctaacttcatgggaagggctgtggtgagtttctggaatgtgaataggaagttgtttttctaaacagcctgacactgaggggaggcagtgagactgtaagcagtctgggttgggcagaaggcagaaaaccagcagagtcacagaggagatg

SEQ ID NO: 11963 - DNA, 4504 bp, Homo sapiens
agggacctccccagccatgggggcagggccaaatggggcttcttcaggaccagcaaagccatttttctcatcagcaaactagcttcagagaagtttgcaatcagggcactctcttccaagcctagagacccagggaaaggggtacgggggtgtcccaaggcaaagagaatctacactttttgcccccggagaggctacttccctcccaagatgcctgggattttccacttcagcagggggaaggtaagtcacatagcaaaataatgagggcacagaacagatgacctccctatagagttttgaatgagaaacacagcagggcagatgtgccccttctctagtctaggaggagctaggtccagcccctgaacatcctccccctcagaaaagctgaggccagactaagaattcaccagaccaaggagctacaacaggacatcagagctgaggctgcaaagccaggactgagaccagaccaggcaggaaactgtcaagagctttggtcaccaggcctggctgccctccaacatcagctggctctttctaaattgacacaccacatgtccctaaaattctctcttcaagtaataccaccatcaaagcaggacatttcccagagccttagagcctggtgtctgctcagtgggactcaaccccagaagaagctgttaaatcacccactgtttcagtttacaaacttcttacgacttggcaacaagtgaaactacattctggcagcaactgcaagttccctagtacccaggacttcccgttttttcttgctgtactccctcctgttaaatcacagactcatccatctccaacccccagaatatagagaaagagcacaacactacatcttaactcctgagacgtggagaacacttctcctcctgagagcttaagtaccaaatggaagctacttttcccccttggtctcaaatgtattactagattctgaactggactccaccatcacgtaagaaagcagtcatgggcagtaattctgggagatccagataggacatgccagccccacactggtggcataggaagccaagttgctgcttcctccctgtgcactcccatttgtctggcctctcttgatctcagctggcgctcacttcacatcagctatgatgcaatccagcaactaaagtattagttaataaatgctgacagcacagccttttctggtcacgtattcatactaaaatacgggggagagttggggggagagggggatatatgggaaatctctgtaccttcctctccattttgctatgacctaaagctgccctttaaaaaatacaaggggctgggcacagtggttcacgcctgtaaacccagcactttgggaggccgaggcgcgtggatcacctgaggtcaggagttcaagacccgcctggccaacatggcaaaaccccgtttctactaaaaatacaaaaagtagctgggcgtggtcgcatgcatctgtagtcccagctactcaggaggctgaggcaagagaattgcttgaacctgggaggcggcggttgaagtgagccaagatcatgccattgccctccagcctgggcaacagagcaagactccttctcaagagaaaaaacaaaacaaaacaagaaaaaacaaagaatgagctctccacgcgaaaaatccattgagatgcaaaggaaggaagctatcattgtggaattgcacatgtcagttacattaacgtttttggagcaaggtagagctcatctctcccacaagcaaattccagcccaaagcattgatactaataaagtgccatgctgcgatgtgcagggggcagacagtgtctccaagctccctacacacatgccttcccacagtttgccctttcttgaccccagaagcatcaggccccttcaccctcgagggccactatcaggagtttgaattaatggcaatcaccatgcacagggaaggctgtggaattctgacataaaaacacttagtggagggcttggaaaaagtctagtaggagcaagacgcaagctggactaattatctaaaacaagagacctggtttggggatcttaatgttctcaaaaaagaaaattattattatttttcattttgcactttgtgccataaaacattttcaacaaaacatagaatctcatttcttttgagggaaaatgattgggagaccagctcattgctggcacagaggcctggttcattcataattccttcataggcaagacaccaggtgaaccgatatagccgagctggaagagctctccaaggcagagactctgagccaaggaatgttcaaagagctagcatgtattgtgggattactatgcgccaggaattttttacactgcatcacgttccatcttcacaacagccctagaaaggaagaactattattacccccgttttataggtgaataaacaagggcacaggtccttgatgtaacagccaggatcaaacagctgggaagacgagaaaacctttcccaggctaggataacagaggatttggttgaaaatacaggcaattaggtgctacctctgggaaaaggggccaggagaggaaggagacacttttccctgcatgccctgatgtcctatttgaacattttatcatgaacacgaacttcctatttaaaaaacactttttattgaaaagataaatctgtgtgttgtattgtgtcactcagttcaagtacttgaaatttattgaattgtattttctaaaaaatagatagttgagtaaaagcaagctcacattacatagacggatcacagtgcacggctgcggagctgggagcagtggcttcgtttcatgcaggaaagagaacttggttcaggagtgtctacgttgcttaagacaggagagcactaaaaatgaaaccatccagccatcctcccccattttcattttcacaccaaagaatcccaccgcggcagaggaccaccgtctctgtttagacaatcggtgaagaatggatgacctcactttccccaacaggcgggtcctgaaatgttatgcacgaaacaaaacttgagtaaatgcccaacagaggtcactgttttatcgatcttgaagagatctcttcttagcaaagcaaagaaaccgattgtgaaggtaacaccatgtttggtaaataagtgttttggtgttgtgcaagggtctggtttcagcctgaagccatctcagagctgtctgggtctctggagactggagggacaacctagtctagagcccatttgcatgagaccaaggatcctcctgcaagagacaccatcctgagggaagagggcttctgaaccagcttgacccaataagaaattcttgggtgccgacgcggaagcagattcagagcctagagccgtgcctgcgtccgtagtttccttctagcttcttttgatttcaaatcaagacttacagggagagggagcgataaacacaaactctgcaagatgccacaaggtcctcctttgacatccccaacaaagaggtgagtagtattctccccctttctgccctgaaccaagtgggcttcagtaatttcagggctccaggagacctggggcccatgcaggtgccccagtgaaacagtggtgaagagactcagtggcaatggggagagcactggcagcacaaggcaaacctctggcacagagagcaaagtcctcactgggaggattcccaaggggtcacttgggagagggcagggcagcagccaacctcctctaagtgggctgaagcaggtgaagaaagtggcagaagccacgcggtggcaaaaaggagtcacacactccacctggagacgccttgaagtaactgcacgaaatttgaggatggccaggcagttctacaacagccgctcacagggagagccagaacacagaagaactcagatgactggtagtattaccttcttcataatcccaggcttggggggctgcgatggagtcagaggaaactcagttcagaacatctttggtttttacaaatacaaattaactggaacgctaaattctagcctgttaatctggtcactgaaaaaaaattttttttttttcaaaaaacatagctttagcttattttttttctctttgtaaaacttcgtgcatgacttcagctttactctttgtcaagacatgccaaagtgctgagtcactaataaaagaaaaaaagaaagtaaaggaagagtggttctgcttcttagcgctagcctcaatgacgacctaagctgcacttttccccctagttgtgtcttgccatgctaaaggacgtcacattgcacaatcttaataaggtttccaatcagccccacccgctctggccccaccctcaccctccaacaaagatttatcaaatgtgggattttcccatgagtctcaatattagagtctcaacccccaataaatataggactggagatgtctgaggctcattctgccctcgagcccaccgggaacgaaagagaagctctatctcccctccaggagcccagctatg

SEQ ID NO: 11964 - DNA, 4501 bp, Homo sapiens
aactcccatccgtgattgttccctccccagagaccccggtaacattcccgggtaacaagatgcccctggttatcaaattcccctagctcttgaggctggctggacgttatccctcagagggggatgagcatggcaaattgggacttgttattctgaaggattcgtgggtcctgtgaactctaattactttgaaatgggtctaggttgtgagatgtctcagagcactttagctcagctgttattactgtttctaaaggccacataaagggactctgatgggagacattcctcatggaggattcaattctataacatttctctcaataaaggctggtaaatagaccttcattaaaggaaccaagaatttaaatttctaggactcagaggggtggggtcctatacccagtcagagatcctacctagagcctagaccaagagaaaaacacagatggtctctcaaactgatttgatctgacttcgcaggtcattagatatagaatctccgaaaaaggtggatgctgagagacatagacagttcctacactttaagaaatctccatcttgaggtctcaaattgagaaagacttaacagacccatgagagttacagatccctaataacctgggctaaataatccatgtctgccgggcgcagtggctcacgcctgtaatcccagcactttgggaggccgaggtgggcggatcacctgaggtcgggagttcgagaccaacctgaccaatatggagaaaccccgtctccactaaaaatacaaaattagccgggcctggtgacgggagcctgtaatcccagctacttgggaggctgaggcaggagaatcatttgaacctgggaggcggaggttgcagtgagccgagatggcaccattgcactccagcctggtcagtaagagcgaaactccgtctcaaaaaaaagaaaaaaaaaaagaaaagaaaaaaggatactgtgaggagacacaagagcatccatgacatagattatttagctcagctgtaattactgtttctaatacagtaatattagatggtgatctgcctgcctcggcctcccaaagttctgggattacaggtgtgagccaccgcgcccagcctttttttttttttttttttgagacaggatctcactctgttgcccatgcttaagcgcattggccctctcactcactgtagcctcaacctcctgggctcaagcgatcctcccacttcagcctcccaactagctgtaactacaggcactggccaccaaacccagataattttttttttcctgtagaggtggggttttgccacgttacccaggctggtcttgaactcttaagctcaagcgatcctcctgcctcggccccccaaagttctgggattacaggcatgagccaccatacctggcgtacagtatccagtgtaatgcagtgattaaaaattcaggatccagaccgggatggtggcttgtgcctgtagtcccaggggtggaggttgcagtgaacggaaatggtgccactgcattccagcctgggtgacagagtgagaccctgtctcaacaaaaccccccaaaaaccaagaacaaaaaagaatgcaggatctgatgctagattgtctgcattagaactctagccacttaagctgggtgtggtggctcatgcctgtaatcccagcacttttggaggccgcaggcgggtggatcacctgagattgggagttcaagaccagcctgaccaacatggagaaaccctgtttctactaaaaatacaaaattagccaccgggcatggtggtgcatgcctgtaatcccagctacttgggaggctgaggcaggagaatcacttgaacccgggaggcagaggttacggtgagatgagatggcaccattgcactccagcctgggcaacaagagcgaaactccatctcaaaaaaaaaaaaaaaaaaaaaggaattctagccacttagaagctctgtgatcttgggcaaattgcttatctttgcacctcagcctcctcctctgtaatatagggtaatagtatctaccttaaagggttgttgtgaaaattaaatagtttagtacatgtaaagtgcttagacaaagtatttggcattaagcgagagttggatatattagccatcattattaaccacctgggggaacttcaactgatttggagtctaggcatacaactggaaagacctgcctaggagtgtcttgtgaatgcgatttgcataacggtttaggcccagctgacgtcaagggctccttatagctccaggtcagttgtagccctggatgtagttcctgccacgcaacagtcccacaatctccccaccaacccttcttcctacccaactcctgcagcaccaggaagtgaaacaaagaggcagagccctgtgcctccaactcacccttgtccctctcatcccatcccccaggctctacttcctcctccttttcatctttctttcatctcttatcttttagggctcccagaatggggaccagagatgggaagaacataggagacgttgtacacaagtaaggtgaactccctatcctgccccctcccctttccttattccattggtgtccaccttattagggagagaggcaaaacagttctcacccaaactcagataattctctgatgctggaaatgtttaatctaaagggtagatttccatttttttttttttttttttgagacagagtcttgctctgtcacccaggctggagtgcagtggcgccatctcggctcactgcaacctctgcctcctggcttcaagcgattctcttgcctcagcctcccgagtagctgggactataggcgcccaccaccgtgctggctcatttttgtatttttagtagagacaggatttcaccatgatggccaggctggtctcgaactcctgacctcatgatccgcctgcctcggcctcccaaagtactgggattacaggcgtgagccactgtacccggcccttggtagatttaacttagaatcgtaatatttttttttcttctcttagctcatacctacagaatcataatatttgaaccagaagtgtcattgggcagttttgaatagctctaagggaagggagacctccattcaggacaagtttctcagaagaaaagggtcaacctcttgggggaggctttgggagccagctgtgtggtcaccgatggcctcattctgacgtcttcgaaattgttctgggaccctccactggggtcggggcagtcccggctttggaccaccttccactcccacgcccaacctcacactcttagctgtttcactcgatgttgcatcatggagggtgatgaaatcggtgtcagtggattttacccatggatgcaacaagctgaaggaccagccagagtcattgacagtgcaccttcgactacccagaactcctgggcttcctagccatggggtccaaagctgggactgccccgaccccagtggagggtcccagaacaatttggatgacgtcagaatgaggccatgggactaggtgctggaatgtctaagttgaacttccaggccttatttgcactagtcctgaaaaaaacatcatccaactcttatagagcctatgaaatcttgggccactagggttgaggagtcaggtggttcttagtcaataaccctcttcccacaagagcctttctaacctccactgtgaggcctgaaatggggagcaataagacctcatactggcttcccagttctccaagttccttcatgcgcattctctcccatgaaaccaggaccatccagttgaaataatgttgtttccaactgagaaaaagaagcccgtttattcctaatagggggcatcaggtaggaatcaaacttcattgcaaacagctcaccatcctattgggagatgaatggatgtttctctgttttgctttttcctcaagcaggaggaagtgaggaaattaggtttggggtggggtaggggtatagctttgagaggcaaaaagatcagggaaagatcaaacaggaaggaacttgagaccagattaatttaaatatttgttctcccttacccctcccaccccatccccgctgtgccccccatccccgccccttctatagctatttcgattcctggagagcattacacatgtgtcccatcccaggcctctagccacagcaaccacactactcatttcccctggaactgaggctgcatacctgggctccccacagagggggatgatgcagggaggggaatcccacctgctgtgagtcacctgctggtataaagggcgggccttacaatgcagggaccttaaaagactcagagacaaagggagaaaaacaacaggaagcagcttacaaactcggtgaacaactgagggaaccaaaccagagacgcgctgaacagagagaatcaggctcaaagcaagtggaagtgggcagagattccaccaggactggtgcaaggcgcagagccagccagatttgagaagaaggcaaaaagatg

SEQ ID NO: 11965 - DNA, 3103 bp, Homo sapiens
cggcaggaccgagcgcggcaggcggctggcccagcgcacgcagcgcggcccgaagacgggagcaggcggccgagcaccgagcgctgggcaccgggcaccgagcggcggcggcacgcgaggcccggccccgagcagcgcccccgcccgccgcggcctccagcccggccccgcccagcgccggcccgcggggatgcggagcggcgggcgccggaggccgcggcccggctaggcccgcgctcgcgcccggacgcggcggcccggtgagtccccgcccgccgtggccgcccgggcctggatttcctccccgcgggccgggccgctttgttcgcggccggtcgggccggggcgcgagccgcggcgccgccagaatggaggagcgggagcaggaagtggccgagcgggcctgggcggggagggcgcggggcgcgcgggcccggccaagggagggcggccccacgccgggcgccgggggtgcaggctgccggccccagcctccctcatgaccttggggaggccgctccgccgggcgaggccgggacccgagagaagggacgccgccgggcctggagctggggctcggggtgcccctgcgggccgtggggctccccgggcgctgggccagcgaggcagccggcggaggtgccccggggttggagaaagactcgccgcggccggccttcaagtttgtgggagggccccggaaggagacttcgtttcccacggacgaaaagttgtacgtggtggcggggtacccaggctagccacaaaggactgtgaccctcctgggccccggaactgcttcctgtcttgggtgggccctggaggtcctgcccgcccatcccagaggccaaggcttggagggcagctggggcttgccccttagattgagtatcctggggcgctagcgagcttggtcctgtcgggacggcctctgagtgctgccttggtcagcgggtgagcttgggcccctgctctgcagccagaggccgccccacattcactcctgggtctctcggccttgctccaggtggccacttcttgactgctttgagtccctcatccgagcgaagggcggacggagtccgttggtgggggtccggttgcctctcccgggagctgtgtagacttctcatacaccagggttctggaggcagatggaggagccctttcgaaaacagagtatttttttttaagttgtgacttaataatagtagcaagaatatgtgcttatggtaaaggcaggcggcaggtacggaggctgtgggaagtcggggtccctccgcccccacaggcagccctgtgctggcctggtgtatacgtttctgtgcagacgtacaccaccctgtgtgagcacagatgtatttttacacatggctctggacagctgtctgactctgtcagcagcaggccttggaggggctcaggcccgtgtgggggtggggggacatccagaggtctttgagtccagccctctgcctccaggccacgcccactcagtgtcgtcagagccccctgtgcctgaggcgtgcgcggctcggagccctgccctcggagtcctgcggtgccttcctcgagtctggcctgctttccatcctgctaagtacttggggcatttccctctttgggtaaggtgtggtcttccctgtcctggcattagacacaaggcagtgggccttcctgccattctaagtgtagcttaagacaatcagtgcaaagcaaccctttgtgggtgtccagcccttgcctcgggaggccagaaaggtggcctggggggagagcgtctaagctggctgtggaaagacccatgttgggatccattccacagaggtcgtcaggggtctctgcctggcctggaggtcccagagaggaccctcctcccctcaggaaggcccatctggaagggtagcagaggactgctcacaggaagagcatgcgaagtgctctttctggggatgcctgtagttggtgatgtgggaactgggttttgagggatgcctaggagttcatccatcagaggggaaatgaggaagccatgcaggatcaatggataaagtgtgctcaggtgagggttggctggtgggccgctgcagggcgggggcctgtccagtgctcccccacttacttgctgcctcccgactgctgtaattatgggtctgtaaccaccctggactgggtgctcctcactgacggacttgtctgaacctctctttgtctccagcgcccagcactgggcctggcaaaacctgagacgcccggtacatgttggccaaatgaatgaaccagattcagaccggcaggggcgctgtggtttaggaggggcctggggtttctcccaggaggtttttgggcttgcgctggagggctctggactcccgtttgcgccagtggcctgcatcctggtcctgtcttcctcatgtttgaatttctttgctttcctagtctggggagcagggaggagccctgtgccctgtcccaggatccatgggtaggaacaccatggacagggagagcaaacggggccatctgtcaccaggggcttagggaaggccgagccagcctgggtcaaagaagtcaaaggggctgcctggaggaggcagcctgtcagctggtgcatcaggttagggaggctgggaaggccttttggggatgggggtgatttgtccaacggctgggggaggtgggaatggggaggtgagcaaggcagcagctctcagggcctggctgttgcgggtggtggtggcaggggctggaggctctaagcctagaataaggagaggcccaggtccagggaactgtgttcaattacatggatttgacacttggcagccctgagtgttttggggagagggaaggcaggcgggcagatgggggtcagagagcttagagggatggcagcccacctgggaaggcaggtgcgggtggagcccccaggcacgtgcagtgggtctctggctcacccagggcgaggagctgcccttagccaggcgtggcctcacattcagcttcctttgcttctcccagaggctgtggccaggccagctgggctcggggagcgccagcctgagaggagcgcgtgagcgtcgcgggagcctcgggcaccatg

SEQ ID NO: 11966 - DNA, 4513 bp, Homo sapiens
aatacagtcttcccccacagttgaatatagaataaaatctattgcaagctgggtgcaggggcacaagtgtggcaggagtgcttgagcctaggagttcaagaccagcctgggcaacatagtgagacctcatctcaattgaaaatatatatctatataaaaaataaaatttattacagttcatcttgctggaaaacaaaatactgtttttgtaattaaaattttttttttaaatttagaaatggggtcttgctgtgttgaccaggctggtcttgaactcttggcctcaagctgtcctcccatctgggcctcccaaagtgctgggattacaggtgtgaacaactgcgcccggctgacaaagtattttttaaagatgtaccactaaatggagatttgattcacatttgatagtttttgacaggtcttttctatttaaaaacattactgtttttgtagcattattctggcttttcccttaatttagtaaatatttgagtgcctttgtattccagatactgagcaagattggcagggttctgcccttatggagcagaaggaaggtagggggactgactaaaacttgaaaactgtctaacataagtaccatgcagaaaatgaaacagtattaattggcagaaggagagcaggctattttggctagtgtggttagggaaagcctctctaaagagatgtctcttgggtggagacaagatgtgaaaaaaccagcttgcctgtttttggggtttcagccttgcaggtgaagagaaacacgaagttcagaagtcttgaggcacaaagtctggcatgttacgaaagaaggcctttagacgccttgtcagggagtttagattttattctgagttttaaaacgggagtgacacaatgagttgcattttaagcctgttcaggctgttacatggattattaggagctgtatcatttcaggctagtgagatgctcagatgagtctgccttctgtctcttccgtcatctatttctctcttatctggtcttaagctcctccatcttttcctttttagttggaaaaaaactcaaagatctagaaaaaagaggagctgtatgtactcctaaaaagggacctcatagtaacctggggatagagttatgtaggagtgagtcagggctcaggttgaggctttagaggcaggaggcagcgagatcttgttctgtcatcccctcttacagaaataaaatatgccgataaaagtttatagtgtaatagtaaaatataaaaacaaaaagtaagtaatgtagaaaataaaaacccttcacagtcctgctgaaatgattactgttaacactttaattctagagttccccatccatttatttatttctagatttccctctttgtagattaatattaaagggttcagacttgttcattttttgttgtcttggatatcttttcccacctctgtatatatggatctactttatttatcacgtggatattaacatggtttatttaattccctattgttaggtatttggtctttaccacagtttttcaagggtatgaatagtgctgcaaggaatatgcttacacatgtttttatacacttgtcttaggcttctgtaggacaaatttctggagtagaatactaggtcattctttaagaacatttcaaacttttaatagatattaccgtattctttcccaaaaagaatgtacaaagactgtatgagaataactccatgttgtgatcttaagttgtctctaaacctctttggttttcttagctgtcatctaagaatactaagtatctaacctccctcttgatttgggcatgtgatgtgatttagcatatagtggatattcagttagaaacttttggttgaaaacaaggtttggattctgtggtctttaattctaggccatttcagctctgactaaaatgatttgagtgttagtgttatatatgggaaggtaagggctatggagtcagtgcagcccagttcagaatcccagtttgccacttacaagctgtgtgtgtgagaattttctcaactgtaaaatggggacataattcctacctagagtaatactgtaagtattaaggtggataatgattggaatgtatgctgtgtatcctgcctcataatagtaagcttttagtaaatggtagctactgttaataataaaacaagtttctgaaggaggaaggcttgaaaagatgggattccttatcaacctcaaagttttctaaaggaggaaaccctaccccccttacttctgcatggtttctgaccatgaactgaactctgaactctgaatgaactgaactctgaactctgaatgaactgaactctgaactctgaatgttatggtagaaaattcatggactttaaatttaaacagataaagaatctggttattttacccactgctggggtgttcttgggcaagtagcatgacttctgtgtccaaaaaagaaagggtttgcagtgactgaacctgtaatcccagtactttgggaggctaaggagagtggattgcctgagctcaggagttcaagaccagcctgggcaacatagtgagagcctttctcaacaaaaaaaactgttcttaaaaattagctgggcatggtgatgcacgtctgtggtcccagctatgtgggaagctgaggtaggagaatcatttgagcctggaaaattgaagctgcagtgagctgtgatcatgtcactgcaccccagcctgggcaacagagcaagaccctgtctcagaaaataaattaattaaaaagaaagtgtggatggaggaagggattaaaaatctggctgggcacggtggctcatgcctgtaatcccaggcgtgatttgggaggccgaggcggacagatcacgaggtcaagagattgagaccatcctggccaacatggccaaccccatctctactaaaaatacaaaaatcagtcgggcgtggtggtgcatgcctgtaatcccggctactcgggaggctgaggcaggagaatcgcttgaacctgggaggttcagtgagccaagatcgcgccactacactccagcctggcaatagagtgagactctgtctcaaaagaaaagaaaagaaaagaaaatctttggggttcttacacaaattaaatgagataatttattattattattttttttgagatggagtcttgctctgtcccccaggctggagtgcagtggtgcgatctcagctcaccgcaagctctgcctcccgggttcacgccattcccctgcctcagcctcctgagtagctgggactacaggcgcccgccaccatgcctggctaattttttgtatttttagtagagacagggtatccctgtgttagctaggatggtctcgatctcctgaccttgtgatccgcccatctcggcctcccaaagtgctgggattacaggtatgagccaccatgcccggcttgagataatttataaagtgcctaaaatacatcctagaaatattagtttttcttccttgaagtcataaattatggcttacactttttttcaggtatttctcatagtactaatgtgttgctcacactcaagggtagtagttgcttaggaagaagagaaatgtagttgaaaaagtaatagactagaagtcttgagacctgggctcatgttccaagttggcttttttttttttttttgggagatggagtctcgctcttgtcccccagcctggagtgcaatgacacgatatcgactcactgcaacctccacctcctgggttcaagtgatttctcctgcctcagcctccctagtagctgggatgacagacacccaccaccatgcctggctaatttttgtattttaagtagtgacagcattttaccatgttagccaggctggtcttgaactcctggcctcaagtgatgcgctggcctcggcctcccaaagtgctgggattacaggcatgagccactgtgcctggtcccttgctaaatgttttgttttgttttgttttgtttttgaggtggagtcttgctctgtcacccaggctggagtgcggtggcatgatctccgctcactgcaagctccgcctcccaggttcccgccattctcctgcctcagcctcccgagtagctgggactacaggcgcccgccaccacgcccggctaattttttgtatttttagtagagatggggtttcaccgtgttagccaggatggtctccatctcctgacctcgtgatgcacccacctcggcctcccaaagtgctgggattacaggcgtgagccaccgtgccccgcagttgcttgctaaatcttttaactgctggtcccattttcctcatctatgaaatatttaatggaagtgtactattaaagaaacttttctttgctgatgaatgcaggaggtatcattaaaaacccacatagtgctattttcataattactctttatgtattgtgttcttgggttgaatacttttgttctagagttacaattatttgtgtttcttaccaggtttaagaattgtttaagctgcatcaatg

SEQ ID NO: 11967 - DNA, 4502 bp, Homo sapiens
accctgtaggatgggcgggtgatggtatgtatgttagatgtgtggacatatctattaaaagttgtgtcagataacagctggtgctgacaagcccttggtaagatggcagcatgttcaatatgttctgtgaaaattatctcagtttatgatctgtcagtattgtggagctatgcatgaaaggacttaaaattcttacccttaaactcagtaacagtgtttctagaacttctggtgatatgggaaattaagagaattatttatatgcaaaggtgtttattgcagcattgttggaataatagacaaaatggggaagaacaagctcagaatggaggaggtagcttatagtatagacatacgatacaatccagatgataatattttataatagtcttcacaaggaattttatatttttatttttaaaaatacatagcagtgagtttaatataccaaacataccaaaatgtcatcatttactgtgtggtggactcatatgatggagatgataaataaaaatattaatttatttgaggcatatatttatggctgaggaaggaagacagttatgaagaacagctcattctggaaacatactaatttttcccagccataaagagatttcctatttcttttttttttccatttaccttctgtttcctacctgagaagatttcatacttctaataaccatttgtgtacctatttaaagacagtaccaaaggcatacattttagtgtttggaggaccaagggtcatttgatgtttgatgcttattgactattcgaggatgacaagacaccttgagaacacacacacccacacccacacccacaccctcacccacccaccccacccccctccccgaagaaagctgtgaaggaagaaagcagaaaagaacctggagtgagttgtaacttaaaatgttagtgttgcatgaagtgtgttaaaacaggaagatttgaggaaattgcatacattttctagatggcaaagtattactggtgacagttaatgaaaatgcatatgcatgtgtttttagatttacaaattttactaagaactttttaaaaatccctgaaggtgtatcaaaagtttatcatgcttatgaaatagagtagcactttctaactttaaaacggggaataattctttggatcttgattattggaaaagtgaattatgaattgctagtataaaactgtggttttaaaatatgtctgctttatatttttatgtagcagatttactcctagttaataatactcaaacttactgaaaactaaggtaattaagataattctgtcctgatgggaagaggaaaaataacttcagtgtgaaatctattatatattagttgtggcaagatttctcccattgactttgactggagacatttatagggttaaaatcggaaatagcacggtgaattttgaagtatccttgtagttggaaagagtattatgttcatattgccaaaaaaaagatgcatggatgcattagactggatggaaaatacatgagaagttggctagccccctctttgtcaaaacatcacttggtggtgataaagctgttggaaaacacagcattctaatgtagtctgtagtttaatgataatctgtgtcttgaaacatttagcgtagtacttatacaaacctagatggcatagtgtactgcatgcctagcctatatagtatagcctgttgcttctagggtgtaaagctgtatagcgtgttactataggcagttgaaacagtggtatttatgtatccttttttttttttttaaattcttttaagagacagggtcttgctctgttgcccaggctggatgcattggtgtgatcatagctcactataaccttgaactcctaagtgatcctctttgcctcagcctccccagtggctaggactacaggcacatactaccacacctggctaatttttaacatttttttgtagagatggaatttcgctgtgttgtccaggctggtcttggaactcttgtgctgcagcaatccacccgcctcccaaagtgttagaattacaagccacttcgcctggcttgtttacctaaacatagaaaagatccagtaaaaatacagaattaaaatcttgtggggccactgtagcatatgtagtccatcttgactgaaatgtccttatgcagtgcatgattgtacttcataatttttaagcactcctccctcttgattggtacttagtggattttatcatttttgtttcttcataattctttctgaaatgtctactggttggacctttgatctcctgaattgatcgtgatttcttctgttgtattttttgtctttgtcatttttttgtactctaggcagttttctcaattttagtttctattcaactttttgtttttatttattctctccagtatttatggagatactaaattgaagtgttctgtttctctctccaccctatccctagtttcaagttttatctcagtttctatggagtcagttttttcgttgctttaaaaaaaaattttcctgaagtgattggtaagttttggctaattgggagcactagaattgggcccttaatggttggcagggtgtggtggaggagagacagcccttagtccaaaggctcaggccagaaaaagaaagaggaaggctttccttttcctttccggagcagggttctgccctaggtcttgcttggcagtctatttgatttctttagcagttaatgctcagttttttggcatatgtggatctgcctccagagcaggtacaaggtgagtgagtctatgctgttacctaattagatccccatttctaccctttgtttttacttctctatctactgataggtttttaccctccttcacctcatagggttgcagtgaagagcaagatgaatttttatttatgttgcataaattttaaaagctaaaaaatatatatgtaatgttgggaagtcccagtgtacaaatggctattgtaaatttggaacatgaacttgcttttttccattgtaaaaatgaaatcattataaattgcggtcaagttactaggtcagcccacacagagtttacccagtaatatgcgtaaatgttttgcctttgcatcaacaacaaggaaaaacagtactataaaaaaatgttcctggaagccggatgtatcaaagcacttctgaaatagctatatagcctatagacatgaccagttggtttctgagtctgttgacattggccaaaggagaagctcagtgtagaacatgtttggagtctccttttgcagaaatacattggaggctggagtggggaaccaatttttcagaaaggtggtgaagtagttacatagccactcttttaaagacagtcaaaagatagaaactaaggccaggtgttggctcacatctgagataggaaaatcacttgaacctgggaggcggaggttgcagtgagcccagtatgcacctctgcactccagcctggtttggcaagagaccaaaactctgtctcaaaaaaaaacaaaacatagttcacacttaaatattttattccatatctttacatacccaatatgttaatttatagttcaagatgaacttgtttgggacagattttgtaataaaggaaatcgtgttattagaaatatctagaggccatgagcccttaaactgttctaatttgcaagtagttccctgtgtgatgcagtttttttcaatattgcacaataaaggcaaaatacggacaaattagatgataagatttatataaatttttaaaatattgatcaaaatatgtatccatattggtaatatttgtatttataataaatcattgctgtaaatttgaacttagaaaaattttactaataaaggtgcttttgtgttgcaaactttcatttgaaaagtaatttttctttgtaccaaaaaatctaaaattcgctattctagtcaccaaaatttgctttatgaaaaataatttttgatggcactatatcagaaaacaacttgttaaagaaaatgtggagtttttaaaatcccactgtacctctgttatccaaaggggatctgtgaatttttctgtgaaaggttaaaaaaggagagacctttaggaattcagagagcagctgatttttgaatagtgttttcccctccctggcttttattattacaactctgtgctttttcatcaccatcctgaatatctataattaatatttatactattaataaaaagacatttttggtaaggaggagttttcactgaagttcagcagtgatggagctgtggttgaggtgtctggaggagaccatgaggtctgcgtttcactaacctggtaaaagaggatatgggttttttttgtgggtgtaatagtgacatttaacaggtatcccagtgacttaggagtattaatcaagctaaatttaaatcctaatgacttttgattaactttttttagggtatttgaagtataccatacaactgttttgaaaatccagcgtggacaatg

SEQ ID NO: 11968 - DNA, 4653 bp, Homo sapiens
ccatcctgggccattgggccagctccagcctcatccttgaatggtgggtgtacatcgctggggtccttgctagattatattagggcctccacacactttagttgctctccgtttgcacaatgatttctatatcattagtacctctttgtccacttgcctaattatttccttaggataaattcctaagaaatcaaatagctaggtcagtatatagcacattttcacagtttgctactgactagagatattaaaggtacaaaaacagccagaattagatgtagagtcgcaagggagttttgttactaagacgtcatttctaatcagggagaaaaaatgagttacggaataaacggtattggaacaataggctagccttctggagaaaaataacctcactccttatacaaaagtaaatcccagtggaagccaagatattaaaaaaagatttaaaaaaggaggacaatttttatatgatcttgataaggaggaggcctttctaagcacagtacaaaatcaagaagtcatgaaataaaaggctgataagtttgactccatgaaaattaaaattttctatggaaaaaaatacaataaagtcaaaaatcaatcaacaaactggaaaatagatttgcaacatacataagagacagcaggctaattttggtattatacataaaaagctattacaaatcatcaaacaaaagctccacagccaaaatgaaaaaatgaagagacagttcaaagacaaacaaatgtagataattgtttaacttaaggaaaggtcaaaatatttggcaactctgtgttggcctgggtgtgaccatgagcggtagttgccagtggtattcacaaatataccctttctcctccttctgggcacttggtgtgattgcagtttcctacatttgaccttaggtgtggtcatgtgtctcgcttaggagaaggaaatgtgaacggaagtgttgtgggtcacttttgtgtggaagctgcatggagtcacctctttgctttccgtcagcctcagtgttcagcaatgttctgaatgatggttgctttatcagtctggttctggggtgagggtaatgaagtagtgaagcaaagtccttgatggacatgtgaggtgagacagaaataaacctttgacatttcaagcccctgagatttggggcgtgcatgtgctggaagcagaacctagcctattctgatggattcctccagcactgctcgtgggaagacatcatcaatatagagcattcatgtgccctttatctcgaaattccacttccaggaatttatgaaacagatactctcacatgtgcaaacagctatggataaggacagacatggcaacttggattgcaatagcaaaagacagaaacaaccaacggaaacaccaaccaataggaaattggctaaagacattgtgaaacatacatagaatgaaataatctgcaaccagaaaaataaggcagtagatgtatgtgtaccagtgtggtttttattccgagattagggctaggttaagacgtcagattaagttgtccctctccaccccaccaatataaataaaaagttaaaagtaaatcataaactatttttacaattttaaaaagtgggttaaagagcccatccaagtagttttataaaagtagactatctccgaaaagatacccaataaataggtatattactttcctggggctgttataacaagtttctacaaatttgctggcttcaaataacaaaaacgtattctcttgcagttatggaagccagaagtatggaatgaagggttgcagggtggtgccctctcccaaagctctaggggaggaacattccttgcttcttccagctcctttgggggctcctggcattccttggcttatgtcggcacagctctaatcggcgcctccattgttacataggtgtttctgtgtctcaagtatctctcccctttctcttctgatatcagtcattggatttagggaccatcctaaacccaggataatctcctcatgagatccttaggtcaattacatctgcaaagatctcatttccaaataaggtcacattcaaaagtaccaggggttagtcttagacttatctttttgggggacacgattcaacccactaccgtgggtaacagtggttttccctcagaaggtggtggttcaggagtgggaggaagatgaacttttcactgtatatcctttcaaactattcacgttttaaaaaaaacattttcatgtaaatttaaaaaaattgaacattcacacaaaaagatgccccctcccttgcaaaaaagagtatgcccgttcaaaatgttgaaatgtacactcacagcaatggtggctgcagactccaagtttctgaggttggagaaggtagccagggagcataaaagtgagttctatctactcattcagtctatgaggggaaggcaatggctagaaaagcattttgagggacagtaaaagtggcatttttagagggaggaagccttgaggatgcttgtggggtgaagggaaagaataactcaggaagaggcatttagggataagaggaggagaggagatagtggaggtaggtgatccctgcggaggccagattggggcaggggagtgtcagctgagtataagaggatggtcccctctgccctgaaggaggaaggcaggaggggaaaaggatgggtgttgacccagaaagcacttgtggtggaggggaggccccagaagaggcttctgacttaccctgattgctggtacctctcaggggagctggctgcttatttgctggccagggtgtgggggaacccatttgagaagagggagaaggtgacacaattcctttgggcaacttatgggaggggtaattggtgagggatgaaagccctgccaagtggcaggaggcccagctggggctgcccctcataagagtgcagtggaggatatgggatgagaagtgactgcccctctggttccatctgtcgcagagcccagggtgcttccttcctcccccacctccctcagaacacacccactgcatgctggacagcagcccccttcctgggcctggggacatccatgtccctctgtgcacaggcttcatcattctctgggtgcacggtaacgaccccggtaggtgagaggccaaggtcccaaaggggagcagcagggaaagttagctcccatctattcttgctccaggggaggcctttgatgaggaagctgccaaaagcacattgcaaatacaattccaattacaggcaacaggaaggagaaccacctctgccacctctgtcagcaaaccatgagctcctactctgtgctgcgatggcgggctcgatggggataactctgaccttacctcatggagtcactgtcaacccactggttgcactgtctttgtgcactggctctctggagtgaggtctttgcaaacaaagtggaaagagcatcaactttggactccagcacctagattcagagcaggccatttcactcggaatctgctgtgcatctgcaagggaggatcataaattcgcctttgtttcttcccagtatcgacagcccttccagaaagagcaagcctcatgtcatgccacatgtacaatctgaggccaggagctctctttccccttttcatcctcctgcctggtacacaataggtgtttactggatgcttgtccagttgatttcttgaacatggtgtgtaaaaggaatctttgcaaattgaatcttctggaaagctgagcttgtgcctaccatagaattctgaatgtacctatatgacgtctttgcaaacttaaaacctgaatctttgtagtataaatcccttgaaatgcatgtaggctggacatcaaaagcaagcaatctcttcaaggagcagctagttggtaaggtcagtgtgcagggtgcataaagggcagaggccggagggggtccaggctaagtttagaaggctgccaggttaaggccagtggaaagaattcggtgggcagcgaggagtccacagtaggattgattcagaagtctcactggtcagcaggagacaaggtggacccaggaaacactgaaaaggtgggcccggcagaacttggagtctggcatcccacgcagggtgagaggcgggagaggaggagcccctagggcgccggcctgccttccagcccagttaggatttgggagttttttcttccctctgcgcgtaatctgacgctgtttggggagggcgaggccgaaacctgatcctccagtccgggggttccgttaatgtttaatcagataggatcgtccgatggggctctggtggcgtgatctgcgcgccccaggcgtcaagcacccacaccctagaaggtttccgcagcgacgtcgaggcgctcatggttgcaggcgggcgccgccgttcagttcagggtctgagcctggaggagtgagccaggcagtgagactggctcgggcgggccgggacgcgtcgttgcagcagcggctcccagctcccagccaggattccgcgcgccccttcacgcgccctgctcctgaacttcagctcctgcacagtcctccccaccgcaaggctcaaggcgccgccggcgtggaccgcgcacggcctctaggtctcctcgccaggacagcaacctctcccctggccctcatg

SEQ ID NO: 11969 - DNA, 4498 bp, Homo sapiens
acatatagttcagtcttattcttgtctgtatggtcagcacttatgttaggccctcaggaaaagttgacagaaccgatggatcactgccggtctgaaaaggaaatgaggaaaacaaattctcctaccttgaactattctgcaaactttaaccattggggtaattgtttatctgggcttcttggatcatgataagggcttagggtttactcagtggaggccaacccagcatgcatagaatcataatatttcaatattaaaaagaatgctgcattttacacagagtggaagtgaggccttgaaaatttcaattaattgctcaaagtcctaatagtttttatttgaactagtaaatataaaattataccagaattcagatagactgccttgataatagattactttgaaaagtttcaattttttttttttttttgagatagtctcactgtgttgcacaggctggagtacagtggagtgatcttggctcactgtaacctccacctcctgggttcaagtgattctccagcttcagcctcccaagtagctgggactacaggcacccgccaccacattcagataatttttgtatttttagtaaagacagggtttcaccatgttggccaggcttggtcttgaactcctgacctcaggtgatcctcccacctcagcctcccaaagtgctgggattaaaggtgtgagccaccaccacacctggccttcaattcactttttaatgtttattattttactctgatactaaaaattatgcatgtttaacatgaataaggacacacttctacacacacatgcatacatttacatctatgcctctatattaaaaagtatgggggaaagaaatggggagatgtaggtcaaagaatataaagcagcagatatgtaggatgaagaagtctagagatctaatgtacaacatgaagaccatagttaataacattgtattttatttgcgttttttgttaaataagtagattttagctgctcgtcatactttacacaagcctttatgtgacggtatagatatgttaattcacttcactatagtaaccattttactatctatatatatcccataacatcatgttacaaacctcaaatatacacaataaaatttatttttatttatttaatttatttatttatttttgagacggagtcttgttctgtcgcccaggctggagtgcagtggcgcgatctcggctcactgcaagctccacctcccgggttcacaccattctcctgcctcagcctcctgagtagctgggactacaggcacccaccaccacgcccggctaattttttgtattttttagtagagatggggtttcaccgtgttagccaggatggtctcgatttcctgacctcgtgatctgcccacctcagcctcccaaagtgctgggattacaggcatgagccaccgcgcccggcctattttatttatttttgagacagagtcttgctctgttgcccaggctggagtgcagtggtgcaatctcggctcactgcaaactctgcctccctggttcaggcaattatcctgcctcagcctcctgagtagctgggattacaggtgcccaccaccatgcctggctaatttttgtaatttagtagagacggggtttcaccatgttggccaggctgatcttgaagtcctgacctcaagtgatcttccagctttggcctcacaaagtgctgggattacaggtggtagccgccactgcatccacccagaataatttattttttaaaaaactatgagttcaggccgggcgcagtggctcacgcctgtaaacccagcactttgggaggccgaggtgggcggatcacctgaggtcaggagtttgagaccagcctggccaacatggtgaaatcctgtctctactaaaaatacaaaattagccaggcatggtggtgcatgcctgtaatcccagctacttgggaggctgaggcaggagaatcacttgagcttgggaggtggaggttgcaatgagccaaggttgcgccattgcactcaagcctgggcaaaaagagcaaaacgccactcaaaaacaaaaacaaaacaaaacaaaaacacccccccaaaaaacaaaacaaaacaatgagttcacactgatacctccaattccaatacaatagcgtaaggtattctcccttcccatacttctaacgtcattctaccacagtgagaaagctggctctgtcatgcttaatatatttagtgacttaatcaaccatcctgaatgcaactaacctcccatctaagcttctaggccttccccacttggatgccttgttctcccctcttgggccctacggctaagactttgtgtaggactgcctcccaggtgttcaagccctcttcattttctcaggttcctcagcctccttacctgctaggtcaccaacacctggctgtggataaccaggtgtagatgtttcctttgttctgtacacgtttcctttgttctgtacacctaatgtctttgacacttagtattttaggatgggaaaggggaagaggaacactgaatgtgcacttttaaatgggtattgtgcctcttattaagctctttattcacatcttatttctttagtaattcacagaattggaatttttggattaaagttctttttttttttgagacggggtctcactctgtcgcccaggctggagtgcagtggtgtgatcttggatcactgcaacctccgcctcccgagttcaagcaattctctgcctcagccccccaagtagttgggattacaggcacccgccaccacgcccagctaattttttgtatttttagtagagatgggtttcaccatcttggccaggctggtcttgaactcctgacctcgtgatccacccgtctcggcctcccaaagttctggaattacaggcgtgagccaccgcgcctggcctggatgaaagtttttttaaagggagtcttgctctgtagccctggctggtgtgcagtggtgtgatcatagctcactgcagcctcaaactcctgggctcaagtgatcctccagcctcagcctcctcagtagcttggacgacagctgcacacaaccatgcccagctaatagagacgggggactcactatgttgcccaggctagtctcgaactcctgggctcaagtgatcctcttgcctgggcctcccaaaattgggattacaggcgtgagccaccgctcctggcccgaaagagtgtttttaaggctttaaaaaaatattgccaacatggtgaaaacccgtttctacaaaaatacaaaaaggatccgggcatgacggcgagtgcctgtaatcccagctactcaggagactgaggcaggagaatcgcttgaacgtgggaggcagaggtggtagttagcggagatcgcgccactacactccaggctgggcaactgagggagacaccgtcttaaaaaaaaaaaagttcccaagtctaaaaaaaaaaaaatcatcaatctgctctcaaaaactgtcgcaacaatttacaatctcatcagcactgagtatccatttccttgcacccttctcagtagtattaccattaaacaaacaaaatttatatgcgtcagtttgttgggctcaaaggagcctctcgacaagtttcctattccccacgctgcctctcctctggacacaggaaggggtccttttccttatttattttgttatttcattttcgtcaacacggctcggcttggggacaggggtcgggggcaggccggttaccgcagaggtggaggccgcgcggcacctggcctggagagctcaccacacagcgacacagacttcttctcagctgggtccacctgcttgcctcggggcgacagagggcgccacggcgtccgcgacggaccccgcccccaggcagtgcgccgcgctcccgtgacgtatttccgcgtcatctgccgccgaggcttgcccccattggttgtctgcgaggcaataggggcggagccgagtgggagtgtggaaagcgccgcatcccgggtgggaggcgaggcttccccttccccgcccctcccccggcctccagtccctcccagggccgcttcgcagagcggctaggagcacggcggcggcggcactttccccggcaggagctggagctgggctctggtgcgcgcgcggctgtgccgcccgagccggagggactggttggttgagagagagagaggaagggaatcccgggctgccgaaccgcacgttcagcccgctccgctcctgcagggcagcctttcggctctctgcgcgcgaagccgagtcccgggcgggtggggcgggggtccactgagaccgctaccggcccctcggcgctgacgggaccgcgcggggcgcacccgctgaaggcagccccggggcccgcggcccggacttggtcctgcgcagcgggcgcggggcagcgcagcgggaggaagcgagaggtgctgccctccccccggagttggaagcgcgttacccgggtccaaaatg

SEQ ID NO: 11970 - DNA, 4511 bp, Homo sapiens
ggaactacaggtgcccgccaccacgcctggctaatttttttgtatttttagtagagacagggtttcactgtgttagccaggatggtctctggtctcgatctcctgacctcgtgatctgcctgcctcagcctcccaaagtgctgggattacaggcgtgagccaccgcgcccggccttgtatttttagtagagacagggtttgtccatgttggtcaggctggtatcgaactcccgacctcaggtgatccacccgcctcggcctcccaaagtgcagggattataggcatgagccaccacatctggtcttcttctttttttttttttttttgagacagagtctccctcaggctggagtgcggtggcacgatcttggctcactgcaacctccacctctcaggttcaagtaattctcgtgcctcagcctcccaagtagctgagactacaggcacctgccaccatgcccagctaattttttttttttttccgagatggagccttactctgttgcccaggctggagtgcaggggcacaatcttggctcactgcaacctccacctccggggttcaagcagttctcctgcctcagcctcccgagtagctgggattacaggtgcccaccaccatgcccggctaatttttgtgtgtttttagtagagacggggtttcaccatgttggtcaggctggtcttgaactcttgacctcaggtgatctgcccacctcggcttgccaaagtgctgtgattacacccgtgaccagcctaatttttgtatatttagtagagatggggtttcaccatgttggccaggctggactcgaactcctgacctcaagtgatcacctgctttggcctcccaaagtgctgggattgcaggtgtgagccaccacacccggcctctccttattttaatggctcattgttaaacatttaccagctcactactgctgggtgcagaggaagagaatgaactaaaaaggcagtgaacagactttctggagtaaggggaagtgttacatggatgtatagagttgtaataatccaagaaattgaacttcagaaacttgtgcattaataggtgagtgcagtggctcacggctctagtcccagcactgctgaggacgaggcaggaggatcgcttgagcctaggagtgtgagaccagcctgagtgacatggagaaaccctgtctggacaaaaaatacaaaaattagccgagtgtggtggcgtatgtttgtagccagggctactagggaggctgaggtgggagaatcgcttgagccagggaggtggaggctgcagagagttatgatcgtgccactgcactccagcctgaggcctgggtgacagagtcagaacttgtcttaaaaagaaaaaaaaagcctaaaataggataaaatgggagaaagattgctaggcaaaacagaaggaacatggaaatagccctgtctctgaaagggcctgtccttatttgaggccacatatgcatccatctgaattttggacaagcgggtgggagcgatgagaagtaaaactgaaaggcccagattgtaaaaacccaggagcaggcttccccaggagcagtgttttgtttgttgttttgttttgttttgtttttttcgagatggagtctcggtcggtcgcccaggctggagtgcaatggcgtgatctcggctcactgcaacctccacctcccgggtttaagcgattctcctgcctcagcctcccgagtagctgggactacaggcacgcatcaccacacccagttaatttttgtatttttagtagagacggggtttcaccatgttggccaggatagtctcaatctcttgacctcatgatccacctgccttggcttcccaaagtgctgggattacaggcgtgagccaccgcgcccggccagttggttggttttgttttttgagcgtgagtctggctctgtcgcccaggctggaatgcgatggcacaatctcggctcactgcaacctccgcctccggggttcagttatcccacctcagcctccctagtagctggaattacagccacccgccaccacacctgtgtaatttttgtatttttagtagagacgaggtttcaccatgttggccaggttggtctcgaactcctgacctcaagtgatcagcccacctcagcttcccagggtcctgggattacaggtgtgagccacggcacctggcaaaaaattaaatttttttttgttctgttttattggagacggagtcttactttgtcgcccaggctggagggcagtggtgcaatcttggctcactgcaacgtctgccccccgggttcaagcgattctcctgcctcagccgcctgagtagctgagactataggcacacaccgccaggcctggctaatttttgtattttatttatttatttgtttgtttgtttgtttgtttgatttttttgagacgaagtctcgctcttgtctcccaagctggagtgcaatggcgtgatcttggctcactgcaacctctgcctcccgggttcaagcaattcttctgcctcaacctcgcgagtagctgggattacaggcacgcgccaccatgcccggctaatttttgtatttttttgttttagtagagacggggtttcaccatgttggccagactcgtcttcaactcctgacctcaggtgatccacccgcctcgacctcccaaagtgctgggattacaggcgtgagccaccgcgcccagcctatgacctttcttataaagtggtacggctattgtattaaatagtaaggtggtgcttcaaaaagttcaacatagaattaccatataatccagtaattcctcttcagaacatatacccaaaagaactcaaggcaaggactcaaacagatatttgtacatctgtgttcatagcggcacgattcaccgaagtgtctagtggcagataaatggataagcaaaatatagtccatgcacacaatagaatattattcagccttaaaaaggaggaaaatcctgactgggtgcggtggctcacgcctgtaatcccagcactttgggagatcgaggcgggtggatcacgaggtcaggagatggagaccatcctggctaacacggtgaaaccccgtctctactaaaaatacaaaaaaattagccgggcatggtggtgggcacctgtagtcccagctactcgggaggctgaggcaggagaatggcgtgaacccgggaggcagagtttgcagtgggccgagatcgcaccactgcactccagcctgggtgacagagcgagactccgtctcaaaaaaaaaaaaagggaaatttttctttttttttttttttctgctcttttttggagcagggctacccgattggaagtatgcccggagtagtcaagtgggtaaattctaacacaggttacaacgtggatctaacacagctacaacaggcaccttgaggacgtggccctcagtgaaatatgccagccacaaagggacaaaacctgtgtgatcctactcatatgaagtccctagaatcatcagattcacaggaagtacgacgttgggttccaggggctggggagggggatagggagtgaggtttcataggggacagtgtttcagtttcggaagatgagaaaattctggagatggtggtggtggtggttgcttaatgccgctgagctgtgcatttagaaatggttaaaatgacaagttttatgttatgtgtattttataataaaaatgtttcaacatgcgcatagtaatatatgcaattttatttgtcaattaaaataaattttaaaaatgttttagagtggccttgttctgatgaaggagggggagtaactgacactctaaggcggtgggggctaggggcgtgtgtccacgcttgccaaaaagattaaatggactctgggtgggtctcgtccactgttctggggtcttacgggttctctcagccccagcctggggcaccacaggctctcaggagtctggctaccctgcccacctgtgcacgaccatcaccccagccttcatccctccgtctcctcccctgctcccgcgcctcatgccccaagcgcttgggcacacgcgccgtggtaaggcaagcgagggcgcccggtcccggcaccgcctcgcgtcggtctccgcccctttcccctccgaaaggcggccttgtgctgctgcgcaggcgcggcggctgggggtggggtccatcgcggctcccgatcccgttatcgcgagaagccggtccgcgatcttgtggccgcccctcccctccccctgcctctcggactcgggctgcggcgtcagccttcttcgggcctcggcagcggtagcggctcgctcgcctcagccccagcgcccctcggctaccctcggcccaggcccgcagcgccgcccgccctcggccgccccgacgccggcctgggccgcggccgcagccccgggctcgcgtaggcgccgaccgctcccggcccgccccctatgggccccggctagaggcgccgccgccgccggcccgcggagccccgatg

SEQ ID NO: 11971 - DNA, 6127 bp, Homo sapiens
atctaatctatctatatctgtctatctatctttatgtatctatcttatctattgatctatctatctttttttttttttgagacagagtcactctgtcacccaggctggagtgcagtggcacgatctcggctcactgcaacctccgcctcccgggttcaagcgattctcctacctcagcctcctcagtagctgggactacccaccaccactcctggctaatttttgtattttcagtagagatagggtttcactatgttggccaggctggtctccaactcctgacctaaagtgatccacccaccttggtttcccaaagtgctgggattacaggcgtgagccaccgtgcctggacatatatctatcttttttttttttgagatggagtctcgctctgttgcccaggctggagtgcagtggcgtgatttcggctcactgcaacctccgcctcccgggttcaagtgattctcctgcctcagcctcccaagtagctgagattacagacgtgcgtcaccatgcccagctaatttttgtatttttagtagagatgggatttcactatgttggccaggctggtctcgtactcccgacctcaggtgatccacttgccttggcctcccaaagtgctggaattacaggtgtgagccactgcatccggccttatatatctatcttgtctgtctgactgtctaatctaattcatctattttatctgtttatcttatctatcatctatttatctaatctatctgtctgtatgtctgttttttttttgttttttttttttttttgagatagagtcttgctctgtcgccgaggctggagtgcggtggcgcgatctcagctcactgctgaacctccgcctcctgggttctaagcgattctcctgcctcaatctttggagtagctgggattacaggcccgtaccactgtgcccggctaattttgtatttttagtagagaagggtttcaccatgttggtcaggcttgtattgaactcctgacctcaggtgatctacccgcctaagcctcccaaagtgctgggagtacaggtgtgagccactgtgtctgtccctaaatgtctgtctctatctatctatctatctatctatctatctatctatctaatctatctttctgtctaacctaatctattttatctatcttattcatcatctatctaatctgtctgtatgtttatctaatctatttacctaatctatcaatctatcatctaatctatctaatctgtctatctaatctattttatctatctatctatctgtccatccatctatctacctacctgtctatctcaagcacctaccacgtattaagccctggctacctcctcttccaggcagatggagtaactggaggcagctaacaaagatggagtcacttttcttatcttctcctaaaccaccgtaagaggaccaagcccccacaccttctgagtgccccattcctctccacagattgtgtcttagtgcccagcaggaaacacagtccacctcccatggttcaagagattgtagaaagggggttattcacataggttaagggaatcaatcaatttgaagcacagacactattaacagcaggaagagtcctgaagaagtgaaaatggtgtttctggaacccagagagtgcttgcactctggataaggggccaccccacagaagctgtggaggggcagggctgcaggtgaggatgaacacacagctattgacagaaaatatgcccagggcagggatagagtaggaaaaatatcccagcttctttcccccacccttccatctcatctctgaaaggcacttcccactggccagccccgactggtgctggagggcaagagagcctatgagccatgtgtggctgtcagccccttggtggagagccacagacaggatggagagtggctggcagggccccgtggggatgaacagcttggattggggcgactgggcttcatccaggctgggctggatgtgtgcatacatttcagtgacccgttttagaaacagaattaatatggtgaatagagaaagaagaaatcagtgactttcgctcctccatacaattcaatttggcttaagttagccaaagccataccaagtcctctctctatgtctcagctgctgccaggcttgtggtggccacacagctggctagactgtcatctctgtcctcaaggggctcaagctagaggaggagagttgagaaaccaaatcactatacacaaagtagaaggtggaacacacccaggagcatgtcaacggggtgctgtgggacttcagagtaggcagatcgtcaccaagcttcaacggcaaagatgccactgggggaaagaaggaccaagcttggaagacagagtaagtctggaggcaagatcttgtctcaccagcaggggccaggtccatggtgacaccttccccaggcagtcacctctctgagcccactttatatcctaggcctggattcaaagacacttgagccctgctccagccttcctttgaggtgctatcttggtgcctttcctataatcactgctccagtcccatgtcatctggtccccagttaccacatcaagcttcccgaagctccacacagaccatgccacatctttaccaaaaaatcagcagtgggtcccctcacctccaggacaaagctccagctcttcgacctgcctgtcaatatttgcaatcactgcctgcacaaattagctgggtgttgtcatgaaaggatcacttgagcccaggagttccaggctgcaatgacctatgattgaaccactgcactctggcctgggtgacagagtggatctaaactaaaaataaaaagatttacagtcaagcctcaaaggcttttcccataccttcttccaccatcacctccctgagccctctctttcctccgaagcctcctcgcacatccctaccacctttgcacacctcagaatggggacacctctcccctttcctctccatctaacttatggttttcaaacttgagcgtgatcagttacctggagatttgtgaaaacccagatgactagacccacccccagtttctgattcagcaggtctggggtggggccgaggatctgcatttctaacaagttcccaggtcatgttgccgctgctactgatccaggactttgggaatcgctcctctaatctacagctgtccattccccatggtccattcagagcctctctgccctgcccccaccacccccagtctcgcctgtctgccaagcgcacaggaaactctccttcatccaaaccctggaccaacgccttctgcttggcccactcagaggccttgtagggttggtctgatattggacagagaaatggccctctgctctttctcccctgacctctctgaagggggcctgcccctccacacctgtgggtatttctcgcaaggtggagacaagagactgagaaaagaaataagacacagagaaagtatagaggaataaaagtgggcccaggggaccggcgctcagcaagtgaggacctgcaccggtgctggtctctgagttccctcagtatttattgatcactatctttactatctccgcgaggggaatgtggtggggctatagggtgaaggtgaggagagggtcagcagaaaaacatatgagcaaagactctgtgtcataaataagtttaaggaaaggtgctgtgcctggatgtgctagatttatgtttaactttacacaaacatctcagtgtagtaaagagtaacagagcagtattgccgccatgatgtctcgcctccagacataaggcagttttctcctctctcaaaatagaatgtatgatcggttttacaccgggtcattccattcccagggacgagcaggagacagatgccttcctcttatctcaaccgaatagaggccttcctccttcactaatcctcctcagcacagaccctttacgggtgtcgggctggggggctgtaaggtctttcccttcccatgaggccatatctcaggctgtctcagtggggggaaacctggacaatacctaggctttctcgggcaggggttcctgcggccttccacagtgtattgtgtctctggttaatagagaacggagaatggtgatgactttcaccaagcacactgcctgcaagaacttttctttttttttttttttgagacagagtcttgctctgtcgcccaggctggagtgcagtggcgcgatctcggctcactgccacctctgcctcccgggttcacgccattctcctgcctcagcctcccgagtagctgggactacaggcgcccgccaccacgcccggctaatttttttgtatttttttagtagagatggggtttcaccgtgttcaccaggatggtctcgatctcctgacctcatgatccgcccgccttggcctcccaaaatgctgggattacacgtgtgaggcaagaactttttaaaagtgcatcttgcgcagccctagatccattaaaccttgattcaatacaggacatgtttttgtgagcacagggttgggacaaaagttacagattaacagcatctcaaagcagaacaatttttcttagtacagatcaaaatggagtttcttatgtcttcctttttctacatagacacagtaacaatctgatctctctttcttttccccatacctctcacgctgtatcaggccccaattcttgggaacgtcaccttagaactgtcccacacatttctacagccacttggctcaggccctttgctgaccaggatggttgcagttctgcctttggtgcctcgcctcctccagttctttcactcagcagctgcaggggtccacgtggcaaatctaataatcttcttctctatagaaaatcctctgctggctctctagtgcccaggatccagtcccagcatctcagcacggccttcaagcatttccacgtcctggcctggctccatggtctccccgccaatttgccaccttctccatgcatccttttctgatcccctcctcactcatcccagcaaagaaccccctcctggcctgagcatagcatttcgtggtgtgtatctcagagcatccagttaggggtgtgcaagtttactttgttactggctgatgttgtgaagtcccaagttgttggtgccgcaaacaaaaaattggacatgacacacacaaatagcaaagcagcaaaagtttattaagcacagtacgatccactatggatcaaggatgacctgcgaatggtatcagcatcactttgctatatttcatggccttttctatgtgttttttttctctttttcctcaagctgcctaagctttagccagcatgtgccttttggttgacaggtgggttgcttagtttcttggcctctgtgtgtttacgtgtcatttccttcccatagttttaagtacatgcatgatatgcactctgtaggcatgaaccttaagtagctaattactatacggggtcattttgaggatatcttttctctgtagtacatgtgcatctttttttgcagtggtgcaatcttggctcactgcaacctcctcctccctggttcaagtgattctcctgcctcagcttcctaagcacctgagactacaggtgcatgccaccacgcccggctaatttttgtatttttagtagagatggggtttcaccatgttggccaggctgatctcgaactcctgaccgcaagtgatccacccacctcggcctcccaaagcactgggattacaggcatgagccaccgcacccagcctagtatatgcccatctcttaggagctgctcctaactggtttggtttggatctagccagccatggggctccttattcacttatttatcttctgtttttgctcacctgcctctttctcttgcttctgctcctactcattccttccttaatccaacctccaattccctctgctattctcctgcctcaagttcactaggctggctgcaagggtcctgagggagaggttgtgtatcgcccctgtatactccaggtccagtaaatgtttgctgactaatgattggcatttccctcaggccctgccatttctgtgggctcaggtccctactggctcaggcccctgcctccctcggcaaggccacaatg

SEQ ID NO: 11972 - DNA, 4506 bp, Homo sapiens
cccggggaacccaaattataggcccaggagggatggatgcgcccgtggcggtgagctcagctgcgctgcccaccctccgcttaatgcgccttctgctgcagcaccgtaggccaccacctggaggcaccaaagggtctgcgggccgactgcatactggactctcaggaaggccccactttcagcagtccactccaacaaatccatgggattaccttagacagaattttgcccccttctgtactcaggcctaatggatgggctgtgccttcccagcccaagggggcagtgctgcctgcgggtgcttcaaaggagggtaggctcctctgcccacaaactctaaaccctggagccctgcttcctccccagatcccaaagtcaaggcaaagcccctctcccctctaacatctcacctctaaccctattccaggggggtggtttgctactgattttcaacttcaagcctttaaagtcatccacggtcaaaactgatacagagaaaaatgaagcagggtaaaggagattagtagtgggattctattttataaagggggagggaaaacaaactgaaggaacaaatacatggagagatctgaggaagagcattttagaagacagaaaagcaggtgcacagacccttagaaaggagcatgcttggttcaaaggattagaaaagaggccagtgaggctagtggggagaaattcgcaaggaagagagtggtaggcaatgaagctggagggctaggaaggaggcccctttactttgagtgacatggggtctcgctggaaaattttgagcagagaaatgaactaatcagacttctgttttaggaaagatggctctgggctgggcgcagtggctcatgcctgtaatcccagtactttgggaggccgacgtgggcagatcacgaggtcaggagttcgagaccagcctggccaacatggtgaaaccccacctctactaaaaatacaaaaattaggtgggagtgttggtgggcgcctgtaatcccagctactcggtacgctgaggcaggagaatcgcttgaaaccggaaggtggaggttacagtgagccgagatcataccactgcactccagtctgcacaacaagagcaaaactccgtctcaaaaaaaaaaaaaaagaaagaaagaaagaaagaaattggctctagtaattaaatcaacccttttgatttttgcagtaaaatggagcactgaaatggagcaatcttgggcagtaatgtggggtctaatgaagtttttgggtttttcagatgggtactattgcagcatgtctgcatgcttatgtgtatgttccaggagagagataagtggatgatgcaggaaagaaagaggggacagttgatatcatgattatttgatctaaatagaaagttgggtgcttgttttggcagcacatatactaaaattggaatgatatagagattagcatggcccctgcacaaggatgacatgcaaatttgtgaagcatttcatattttgaaaaagaaatgtcagccaggtcataaacagtgtgacccagatctaggggccttaccctcttgccccctactcctggtgtgtggaatgttggaacaaagcacagtggctcctttcctctcttcccacctctgcttgacaacagtcgtcaaagacagggcttccatattttccagccagcctcccaccctcacggtgttgtatcaatccaccaggccaaaagatgtgacccaggccccagtgggaagaaactcataagggataaaggacaggctccccgtgatacattgtccatttacttgagctatctatgctgggtgctctctgcagggactactggcttttggatctacggagggtgctggaccactacaccttttccctctggggtggatccttggaagggccagatatactaggctgggcaaaagggaagaaaaaagggaaagaaggacatttctttctaaaataacttccatcaggcttcatttgggttaatatgcatctcatttaaaacacaagtgcccgggaatattaatgaaacttacctggcatttattccttagagtgatttccctgccttagaagggaatcctagtcatttctgggacttgagactttaggttcaggcctggggaaatttctcagtcagaaggcatcctaaaagacaagggagatgaaaaaaatgagagctagaactcaaaagggaggcagaaaggcccaaaaaattatttttacccatcaattttgagaagggttcccagcctgtaattgctgcacactggcaagcagctggtaaggtcgaaagagcatgggctttgagtcaaattggtctgggttttaatctggctctaccattgattcatttattagacgtggaccttggacaagtgcctgatctatttttaattctgcaaaatggggagagagaagagatcttccctccttccaggggccatgtgtgtggtggtggggcatgataaccaggctggcagtgccccctattccccatatagggaaaagcagccactttttttttttttttcagatgaagtcttgctctgtagcccagactggagtgcaatggcgtgatctcggctcactgcaatctccacctcccgggttcaagccattctcctgcctcagcctcctgagtagctgggactacaggtgtgcgccaccacactcagctaatttttgtatttttattagagatgggattccactatgttggccaggatggtctcgatctcctgacctcatgatccacctgcctcggcctcccaaagtgcggggattataggcatgagccaccgcgcccagcctgtcacttcttcaataggaggcctaaatggccttgaagctgagtaggagtccctgggagagaagagaaaagtgtacaatggatgagatggtcacaggcactctgggtatcccagtgtggtgggaactagagctttagggaaagacagaaacttggcagaaacatccaaagagaagcaaacacatggaggcacaagtttcctcatctaggttcaatgtagccagcaacccttgtcttcccagtcctctccatcaccatacatacagtggacatccgcaccatttcccatcctttctgagcctaggcctcagagacttagccactccaggctgggttcacctcaataccatcttggttgtaggctcggctctctcccccaatgacatgcactggttgacacataccacagtgtgacacgccataggatgccacgaggtacaaagggcaacagaatgacgcatacacacatatttaatcttcccatgcacatgctcatccacccactccacacacagtccagacactctgcatccctcaatcatgcttctgagtctcctgtcgacagttgccacctccttcctgacacactgccccaggcggtgactgtgacaaggtgactccatgaccttttctgacttgagctaaattccaaaattctttggaaagtttcctaacatccttcgtcagaacaaggagtttctgcacgtaccaacacacaggaggatgcaccctcagaacacagcacattctcactcccacccatattcacgttgttccacttcacacacacacacacacacacacacacacacagccacttgtgcgcttcttctggcgcacatgagcaaactgcctgttgctttaggtttctctccaccgctaggctccttttggttagctcacccccacaactcatccccgggatttccctgaccacagccgcactcacgcccccgtctcccctttttccttctctgtccagccatcgggggttcctgggcggttaagcatctccccggagtcgctgcccagaaccacagctttccttccgacactcaggatgggggagagaggggacgtcggaggggcccggggtgacgtcgaggggacaaccccaccgcgggcggcgaggcgggctgggcccctggcgggctctccccgcagcacactctcgccgcgccccctggcggatgctagtcctcgacgggctccggacgctcagctgagtgaggcgggcgcgcgtgggagggtgtcccaaggggaggggtccgcggccagtgcaggcccggaggcgggggccaccgggcagggggcgggggtgagccccgacggccaacccgtcagctctcggctcagacgggcgggaaccacagccccgctcgctgcccattgtctgcgcccctaaccggtgcgccctggtgccacagtgcggcccggaggggcagcctcctcccgtcacttcagccagcgccgcaactataagaggcggtgccgcccgccgtggccgcctcagcccaccagccgggaccgcgagccatgctgtccgccgcccgcccccagggttgttaaagccagactgcgaactctcgccactgccgccaccgccgcgtcccgtcccaccgtcgcgggcaacaaccaaagtcgccgcaactgcagcacagagcgggcaaagccaggcaggccatg

SEQ ID NO: 11973 - DNA, 4505 bp, Homo sapiens
aatgtgaaggttaaggtcagtagggccagggaactgtgagattgtgtcttggactgggacagacagccgggctaaccgcgtgagaggggctcccagatgggcacgcgagttcaggctcttccctactggaagcgccgagcggccgcacctcagggtctctcctggagccagcacagctattcgtggtgatgatgcgccccccggcgcccccagcccggtgctgcaccggcccccacctcccggcttccagaaagctccccttgctttccgcggcattctttgggcgtgagtcatgcaggtttgcagccagccccaaagggggtgtgtgcgcgagcagagcgctataaatacggcgcctcccagtgcccacaacgcggcgtcgccaggaggagcgcgcgggcacagggtgccgctgaccggtgagatgtccccgtcttccctacccttgagcagagccacaccaggacggatgggcgggcaggggatggcagccaggcagagagggatgacacagctcgcagtcacaacccctgcgctttcgacggagcccaggaagccagggaggggaggtggccggagccccatcaccaggcagctgagccaggggccccggcgcaaccgccgcctgagagcacgagctccaaccacaattctgtggtgggggggtaaatagaacagatataatgatcatcctttcgcaaagatggggaaactgagacctggagacctgccgcgttgcgggagacccaggctagcaggtgacagagctggcctgcaccgagctccttcctgcagcatatcctctgcgaagatgcggatctctcagttgtggctttcggcttgcatgcatgagtcatctagttttcttctaaattctctagctctctggacactgttgcctgtaagtatgaggctgcggatttcagtatatgctgcaaccaccgaaatccgactttttctgcctcctaatgcatctgaggtgcatcagagaaaagtcacacaagatccaccaggcctcagacctctgattccacagtctcattttacagatgataatctgaggcctggagaggtttaggactggtgccaacactaaacagcaaataagtatcagaattgggattcgagccaaagcctcttgaccttccagaatttctggacctagttaaaaaaaatatgatttttattattattttttaaacggagaggttaggaatttaaaggaaagtacagatactatataaaaaaagatgcccatgaaaatgttaagttataataatagtggagcattgggcacaactgaaatggccaatcttgtgagaatggtaaaataaacttaggtccgtgagtaagtggagtattacatagccataaaagtatgcccttaaagaatatttgaagatggtgaatgtgaagaatcttgtataaactgcatggaagacagaaggaaatataccacagtgctaacctttgcctctgggtgatatgaattaccggtgattatttttcttattttccttttggtttagttttctccatttgaagaagcagataggagccggggctttgggattgaaaccctcaccatctgtgtgccctcttcactgtcttcccatcctccccacggctccctgttcacagtcattgattttctttctttcttttctctctttttttttttttttcctgagaccaagtctcactctgttgcccaggctggagtagagtagcgccatctcggctcactgcaacctccgccatccgggttcaagcagttctcatgcctcagcctctgagtagctgggactacaggcgcatgctgctacatccggctaatttttgtatttttagtagagacatggtttcaccaccttggccaggctggtctcgaactcctgatctcaagtaatccgcctgtcttggcctcccaaagtgctggggtgacaggtgtgaatcaatgcgccctgccaggtcattgattttcttaagcctccagccctgccctgcttggaaacgttttgggaagctgctcagttcaaagttcccaggagggtgtgcctggaggggagttgctcccaaagtctgcctgctccccccgccccccctgccccccaccccccgccatcttctcctcctcctcttcccctgagcagcccctttgtccacagaaccggccttttctggtagaaggagcaaggccaagtggtttaagccttcttagggagaatgaggctgtgtggtagtgctggggactcgagggccttggccttggcatggctcttccacccagggcagctggcagccaggctcccaggaggcagaggagatgaggggggaggtgagtccgagcaaaggaaaggaggtcggctgtgcagtcacggttctagaacattccttggatcagcagcatccatatcacctgcagactggctggaaaagcagtctcagaaccaacattataaccagccctgcagtgattcataagtactttaaaaagtggtcaatcatttcagcaaagcagagccacacagtccgggggaccacaggtggcctctgtgtgcttgtctcggttttcctgcccctctccagacatgttgattagacactgccaatgcccagcctcagacctcagtctaatttggaagtagtcagaatttactatgattacataagaccctcgtgtttacagaacacattcccctctctgaggtctggattagatccattttacagatgaagaaactgaggctcagatatttaagtgacttggaatcaaggaaagaatactggactaggggtcgggagggctgggctctcatcccagggttaccatgagcatgctgtggactctagggagtcccatgccctctctgggcttcagcctcaccgctagggtagagaggttgggtgagagaacgacctccttcccaggtctgagctggatggttcaccagggaccccaggctccctggagcagactctgtgcccgctgctgagtctggaattcctttcctgtatcttgcctttggctgccccattcttcatggcccagcaccctgtcttctggtcagaacctagttctgaatgggtttttccagaagttgttgctttcaggggcccctggcagagaggtgtttctggctggctttgtctctctggcatgacaaaggctctgttcctgctggaggcatttcagggctcagtgggcagctggggcagagcccgtgagaccacagccttcctggtgagcccggtctccgccccctaccccatctctggggaaggcgctgaccccatctcttctcccacgctgctccctggctctttgcgcctgattacttctcatgagaggcactccttgttaatgtgctactgagtgtccagatgggcctgctgggctgagcgggctttggatgtgaaccatttcaggaaggggaaccccatcgtcctgttggttctgtgatggcaaatgggtgagctcagataagcagttcttgggaggggcatggtgggggtggagtgcagggggaggggtttctgttttatgcaacagcctcagcttctgggaaagggtccattgtgtaagaccggggctatggcctgtgccccgtggctcagggcagccagcccagtggtggcaggaacactggcagggcagcctgctgtcggcttagaggggatgggcagtgtggagggcctggcagagcaagaggactcatccttccaaagggactttctctgggaagcctgctcctcgggccactgcgaaccctctctactctccgaagggaattgtccttcctggcttccactacttccacccctgaatgcacaggcagcccggcccaagtctcccactagggatgcagatggattcggtgtgaagggctggctgctgttgcctccggctcttgaaagtcaagttcaggtggtgctgagactccctgggggctgcagcgctgtggtgaatggggagcgtctgctggggtgaaggtttaggtgcacattgcagaggacgtggctggtctctgggatgcagtccctctgtggaggtggcatggggagggacggatgcatgacctaaggggggtattttcagtgtctgacatgatcgataccactctggacaaggaggccaggatgcagaaagcctgtgtgcctcgctgattgtcggggaggatgtggcttggacaagagcctggttcctccgatgccagggttcttgtttcttccactcaacattgctgtcctgcagtccctccctccctgcacctcctgccttcgctttcattcgaggtgtccatggcaagtctggtcatttccccccatttcctcaggaataaaagtgcagcagtgcctgctgtggggacagctgagggcagtgaggccctggggagctgctgcaggcagcaggtgggcgggacgccagcaggctgtctagctgttcccatgatggtctcctgttctctgcagaggcgtgcaaagactccagaattggaggcatg

SEQ ID NO: 11974 - DNA, 2011 bp, Homo sapiens
ccacatccacaaagcacaccattaatccactatgatcaagttggggggaatctggtgaagggttctgaatatctccctcttcatccctcccgaaatctggaatacttattctattgagctattacaccagttttaacaccttcctcgtgttatgtttaaaaaaataaataaatttaagaaaaccattttaaataatgcacagttgcagcctggaaaaacttaaggtggcgccttatagtatcaattttaggagctttatttggtgcatttaacgcaactggtaattgcagaatccactttgcctgtgtaagtgaaaaatatagactgttatcttgttggccctatgaaattctgcacttttcattatatactctaccttcattaattacttctggcaagatgttctgccttagcactcagttgcattcttttcctttttcttcctgttcattatgctttaattctgaggaccatatgagggtagaatatattatcttttaaaaattacaaaaatttgtataggcaaaccatttcttaaagttgatggccaaattttaaaatgttatttttcatatcatttataatcttgtcacaatccacttaaagaagtttggttatatttcagtgaaaattttcttccagagtaggttttttttcgtgggttggggggtaactttactacaattagtaagtatggtgcagaatttcatgcaaatgaggagtgccagcagtgtgataatttaaacatatttaaacaaaaacaaaaaaaatgaatgcacaaacttgctgctgcttagatcactgcagcttctaggacccggtttcttttactgatttaaaaacaaaacaaaaaaaaataaaaaagttgtgcctgaaatgaatcttgtttttttttataagtagccgcctggttactgtgtcctgtaaaatacagacacttgacccttggtgtagcttctgttcaactttatatcacgggaatggatgggtctgatttcttggccctcttcttgaattggccatatacagggtccctggccagtggactgaaggctttgtctaagatgacaagggtcagctcaggggatgtgggggagggcggttttatcttcccccttgtcgtttgaggttttgatctctgggtaaagaggccgtttatctttgtaaacacgaaacatttttgctttctccagttttctgttaatggcgaaagaatggaagcgaataaagttttactgatttttgagacactagcacctagcgctttcattattgaaacgtcccgtgtgggaggggcgggtctgggtgcggcctgccgcatgactcgtggttcggaggcccacgtggccggggcggggactcaggcgcctggggcgccgactgattacgtagcgggcggggccggaagtgccgctccttggtgggggctgttcatggcggttccggggtctccaacatttttcccggctgtggtcctaaatctgtccaaagcagaggcagtggagcttgaggtaagtttatctcatgcatagtgttcggctttgggctgtggaatgttcaggcgtttcactgatgccagaaatggagcagaatctatcagctggagacaaaggccttgggcgggggtccttccatttggtgcctacgtggggagatctttggagacagaagggagaatgggaaggagttgcggcctggaggcttcctgctagagctgagaagccttcggggagtaataggaagggggatttccattgcttaggctgagggcggggcccaaggactgttgaaaaatagctaaggatgggggttgctagaaaactactccagaagtgtgaggccgatattaatccggtgtttttgcgttctctagtcactttaagaaccaaatggaaggtcacactagggttttcatttccattgattatagaaagctttaaagtactgtagatgtggctcgccaattaaccctgattactggtttccaacaggttcttgctggtgtgaaatg

SEQ ID NO: 11975 - DNA, 4503 bp, Homo sapiens
cacaggctcaagagatcctcccacctcagcttcctgagtagttgggaccacaggtgtgcgccactacacctggcttgcttgcttgcttatttattgatttgagatgggagtctcactatattgcctaggctggtcttgaactcctgggctcaatcctccaaccttggcctcccaaaatgctgggtttacaggcttgaaccactgtacgtggccttgaatctgtgttttaatactatgcttacttggctgtggtgttgtgaaaagatcactgaaaatggagtcagaggcctgatttgagccagtcgtttgttgtgggggaaggaggtcaggggagctaacatctaaaggctcactatatgccaggcacagaaccaagtgtgtttgcatgtatatttcgtttttgttgccagactttgaggtaggttttatggataaggtctttaaggcaatatcagcttccttttaaaaaagaaattccggaaactgagttttaggctgaagatctctaactggtagtagggacaactgaaccacagggtcctaactgaccctgcgatttatctccttttgcggggggtttcttgataatagggtgcactttacctcattttttggctcaagcatggataggccacccttccttttcatacctatagctaagctttacaaatgatatgctgataagatacaagctactcgttattcatgtgggttaatagacctgtttgtttgcttgtttttaagtctatagccgccccacccccaatctacaatttcaccttctaaggttttagttactcattcaaactgcagtctgaaaatgttacgatattttgagagagagaagactctagctacgtaacttttgtaacaatatattgttataattgttcattttaccattagttattgctgtcagtctcttactgtgccttatttataaattaaacttcatgggtatgtacgtataggaaaaaacatggtatatttagagtttagtactatctgcagctttaggcatccgctgtggggttggcggggggcggtcttgggagataagtggggactactgtacaattatcaggcacacacaggctctgggattttacaaatgagtaaaagtggttcttgctgttgaagcacttacagtgggaatagagtgaaatacatgaaaatgtgattttaatatgttataaatgctatgatggtgggagtttgttttgtgtaaaacatccttttaattggtactttaaattttaatattctttcacaggtctacctatttagtcttacactttcaaagaactacctggatgctgtagattttcatgatatactttattaggtatgttattaatggtagaaacagcatggaaagtcttccagaatattagacaaggacagttctagtactaaaacataaaatgctaactaatgtcttcatcaagacataaaatatgtatcttaaaaaataaattgtaagccaggcgcagtggctcacacctgtaatcccagcactttgggaggctgaggcgggtggatcacaaggtcaggagattgagaccatcctggctaacacggtgaaaccctgtctctactaaaaatacaaaaaattagcctggcgtggtggcgggcaccggtagtcccacctacttgggaggctgaggcaggagaatggcgtgaacccgggaggcagagcttgcagtgagcggagattgcaccaccgcactccagcttgggggacagagtgagactccatctcaaaaaaaaagaaattgtaataacacccacattatacatcagtgaaaactaaacacgttactaccctaggccttattgcacaggggtgctacctccaaggagaaatttgtctaggcagcagatggactagaggtgattagcctatgagcgaatgaggctacagatcattcctttttatctgattccttttctttctagttcctaggccttggaagcactaagtggtcttaagtaatttgcatagaattagttgagttcatctgttaactaactagcagataggaagaaaactattgtcatgaaattatttaaaaaataataatgctccagtttcttctcatctttgatgtcctttggtcctacctcactgccttcctaacaccattttctgctttacctcaaagctggggtcatcttgagtttagcctgcttaatccgagtgactgtcagctttattccactttagcaactcgcaggcaaggccacacttggaaacttttcacttggaatagttctatcttggtgatttcatcagccttctttatgtcaaatacactcaaattcctgcccattcttatctcttcgttcccttcaggtccttagtccttttaatttgtgactttcattctccaggtccattcttattaaatgtctgccagccagactttagttgccccctgtccagctttctcttgctcagacctaagatttctttaggttctttctttgccttttgaaatccagctcagcttttaagattgagttccttgttacctttcctgccatccttctgcagttcctaatattcttttctttctcccaaagtgcttttgtataaacagtcagccttccatatccgtgagttccaaatccatggatcctgaattcatggatttaaccagctgcagataaaaaatattcagaaaaaaaaagatggttgcatctgtactgaacatgtctgtactgttttgcttgtcattattttctaaacaatacagtataacaactatttacatggcatttacattgtattagggattataagtaatctagaggtgatttaaagtatatgggagtctcttatatcccaggaagccaggtaaaaaaaaaaagtatatgggaggctatgcataggtgatatgcaaatattacaccactttatatcacggacttttgagcatctgtggattttggtatccgaggggtgtcctggaaccagttccccagggatactgaagtatgtctgtctatctcatactatatttttccctttgtcttaggtagactatcagctccataggggcaaggatttaataatatttgtatattcattttattcaagttcgtatacactgcttgggtcataatatttattacatgcttgagaaaatgaatttcttcgcccctttgttacagctctgagtaaacagccatctgccttctctgtcatctgttggtggttgagtatttctgtagaaagttacccattggcctcaggactcttactctaaatcttcttcttaggcagttttctctgtgcatgaagtttttatgtaaacaaatagatgaagcctgccctactcatttatttgctcaagccagaaagtcaccttcttcttcactttccatatttaaatcatcatttggtggaattttggcctaagcaactcttgaattcacgtacttttccctgtcatcgccagtgtggtgtagaagcctctgtcaccccttgtcgggatgctgtgctgcagcatcatctaacctggttgcagttattctttcactccctcaccgcacacccttttacttaaaacactaaaagtggcttctcattgttcttaagataaagcacaaattgttagtgtggcctgtaaagctttgcatagcctgacagagaatgtcctgctaataatttgaaggtacaggatgattttaatactttaggagaaaatgttctaggaaaagacgcttgtttagacttaaggtgaggactctgcagtatgaattagacatctggtgaactataagctgtccccgcatttaaacataattggttctgagagcctgcaactaaagataaggcagaagaatttactttgcatttcctgcattcctcttttcgcttgatagcagaaacccctcatgttaataaaggtggcacaagaggcaaaaatacagactttatcacagtgtttaaggagaggtgcatgattaagtgtgtggggagagagtacctttgtacattttattatatggtgaactgtatgttttctacttttagtactgtttgtaaattttacttcttcttggatttacctttttcagttatattattccattatgccttgctactgtaacagctaatgatgaaaaacaggatctgtctttatattttcttccctccacaaatgtggatctcatagagttgaaaactaggttgtgatatagtatagtatacctaattcctgtaatgggatcatgttcctataatatggccgcaatttagtgtagaatttttgtaaataaaagtgtattttaagtttaacttaaactttcaatgaagtgttttaaggatttaaccatgcagcacaaatgagcacctttctgtaaatgccaacagtgtaatatgtgtcatttcttcactgattgttagtttgctgcggattaaaacacaggtgatcatattcaggctggttagattagtgattttaatatgaaaccattgcttttagaataatcatg

SEQ ID NO: 11976 - DNA, 4513 bp, Homo sapiens
ccaggctgatctcaaactcctaagctcaagtgatccatgttcctcagcctcccaaagtgctgggattataggcgtgagccatagcgtccagccctgacttacattttaaaaggatggctcttgctgctgtcttgaaaatagactgagttagtcagtttataaaactggggagattttgcataaaactccagatttctgccttctcttgaaaaataggggctaggtgcgttggctcactcctataatcccagcattttggaaggccaaggtgggcagattgcttgagcccaggagtttaagaccagactggacaacatggcaaaaccctgtctctaccaaaaaaaaaaaaaaattagcagggtgtggtggtgcacacctgcagtcccagctactcaggaggcaagcttgtattcctagctacttaggaggatagtttgagcccaggaagtcaaggctgcagtgagcatgatcctgccattgcactccagccagagcaaaaaagagagcgaaaccccatctcaaaaaaaagggaagatttagctatgttggacttacctgtcctcatggagctgaataatggccacccctccaggtagggcctgaactctacctttgccagagtcccctccactccctgttggtcttagacaatgaaactgagtgttagtagctatttaccaccaagctcatgcttgttgttcttataataaagataaatggtttaataaatggtatgataaagaaaattatattatggtattataccatttaataaatggtataataaagaaaatggttttttgcacccacatttccattaaaaagtgagaaaattaaagatacctgaggatggcagagtgtttgatgaaagatagggaaatgttggccaggcaccgtggctcacacctgtaatcccagcagtttaggaggccggggcaggcggatcacaaggtcaggagttcaagatcagcctggccaacatagtgaaaccccgtctctactaaaaatacaaaaaattagccgggagtggtggcaggtgcctacaatcccagctactcggaaggctgaatggcgcgatctcagctcattgcaacctctgcctcccaggttcaagccattcttctgccttagcctccctagtagctgggattacaggcgcctgccaccatgcctagctaatttttatatttttagtagacgtggggtttcgccatgttggccaggctggtctcaaactcctgaccttgggtgatctgcccgcctcggtctcccaaactgctgggattacaggagtgagccacagtgcccggcctctaatttttatttttaatttttttaatttttatttttttaatttttattttatttattttttgtaatttttaaaatatacaaaaaaagggccgggtgtggtggctcacgcctgtaatcccagcactttttgggaggctgaggtgggtggatcacgaggtcaggagatcgagaccatcctggctaacatggtgaaaccctgtctctactaaaaatataaaaaaattagccgggcctggtggcaggtgcctgtagtcccagctactcgggaggctgagacaggagaatggcgtgaactcgagaggtggagcttgcagtgagccaagatcgcaccactacactccagcctgggcgacagagtgagacttcatctcaaaaaaaaaaaaaattatatatatatatatacatatatatatgcaaacaaagagcatctgagtcataataatgtaaatctatcacctgactgacctgctgccacacctcatgatctcatctgatccccacactccttctctttgggatactgtgtacagccatagcgtgggtgaactttgtattcctatcctccccatttttgttattttattttatttcttatttatttgagacagagtctcactctgtcatccagactgtaatgcagtggcctgatctcggctcactgcaacctccacctcccggtttcaagcgaatctcctgcctcagcctcctaagtagctgggacctacaggcacacaccaccacgcccagctaatttttgcatttttaatagagacggggtttcaccgtgctgggcaggctggtctcgaactcctgacctcaggtgatttgcccacctcagccttccaaattgttaggattacaggcatgagtcactgtgcccggcctcctccccattttataacaagggaaatggaggcccagaatggttaagtaaacccacccagggctagctgagaattagcaacagagaactgggagtagaatttgttccctggccctttgctgtttctattataagccacccagtcttagattttctgttaccttataattaatgactcaaatgcagtttctgagtgagaaacacaagtcccaaacactctttaaagaggcataaagatgtatcttgttgttttcttttgtttgagacaaggcctggctctattgcccaggctggagtgtggtgacatgatcttggctcactgcaacatctgtctcctgggctcaagccatcatcccacctcagcctcctgagtagctggaactacaggagcgcgcccccacacctgggtaatttttctattttttgtagagatggggttttgccatgttgcccaggctggtctcgaactcctgagctcaagtgatccacccatcttggcctcccaaagtgctgggattacaggcgtgagccactgtgcccagcctcttgttgactgtaggaccacaagttggcggctaacttagagcaatgtttggcacacaggaagcactcattaaatattgacattattgtagttattttaatagcccagcattgcacttttaggtctttcagctttcagtgatgatcagttgataattgatgatctggtggagtggttcttaatggtagagttgggggcaattttacactcccttacaccccactaatcttccccccaacccaatggtaaagctattgcacagtacttggcaatgtctagagacaattttggttgtcacagcctggggggaaggtgctactggcatctagtgggtagaggctaaggatgctgcttaattttttttttttttgagacaagagtttcactctagttgcccaggcacagaacagcttcacagaagctgttaatgcacagaatagcttcctacaaaaaagcattacctggcccaaaatgtcattagctaccaggctgagaaacctgccctcctaggccgggcgctgtggctcacgcccgtaatctcagcatattgggaggccgaggtgggcggatcctgaggtcaggagttcgagaccacctggaccaacacggagaaacccagtctctaccaaaaatacaaaattagccgggcatggtggcacatgcttgtaatcccagctactcgggaggctgaggcaggagaaccgcttgaacacagaggcagagattgtggtgagccgagatcacaccattgcactccagcctgggcaactagagcgaaactcttgtctcaaaaaaaaaaaaaaaaaaaaaaacagggaaagaaaagaaaggaaacctgccctcctatcataggataatcccatttcctcctgtctaaagagacgcctacttagtcatcctgggtgactgcatcagggaggtagattttggagtctgaaaggctgggttctgtcactttgttacagtgcctctggtgcaaagaaagcattttaaaaaccctgtacaattaaaaaattgaatttaattactttgtgtaactttgaataattcacagaagtctgaacttctttatcctgtcctgtaaaatggaggtaaaaagcccttggccgagagctgttttgaggaaaaactgaaataacattggtaaagtgtcgcacagtacttggcacacagcagcccctcgacaaacattagctttctttccctttcttgtcggtttcttcctctccaaacccgcgtgttgcttttctttttaattatttttctgtagccctcctttgcggccacaaactcgctttctaacccaggttcagcccttttattggctgagtgaccttgtgcaagtcacttttcccctgtaggcctcggtttattctccgtaaaatcagaaagttggcctccgatctccaagcacgcttttcacgacgaagtgggactgttaagtttacagagctgctttcctcccccgggactgatggtacggtccccgggcggctccccacccatctgtcgcagaccttggtacaggcccagggggccctcggcggcctctccgggctgcccttgccccctgccgagttccgggcccgtgtctgcgcaagctgattggctggagcggtgcccgggctgcgcggctataggtgagcccaggaggggacgggcggggcgggccggaggcccgccccctcccccctgggtcggacgctgagcggagccgcgggcgggagggcggacggaccgactgacggtagggacgggaggcgagcaagatg

SEQ ID NO: 11977 - DNA, 4503 bp, Homo sapiens
accacagcctggatggctcggcacagagaggaacgggctgctgaaacacacgcgctggaggcatctccagggaatcccggaaggatgcgtactgcaccttcccacggctgtcgctggaatgaaacagtgatgggggtggagggcaggctcgtggccaccagcagggaggtgggtgtattgccaagggcacccggaggaccccgtggtgatggggacgttctgcagcttcgctgtcaggggatgcaggagccttcgcttgtgcccacattgtgcagcctttgataggcacacattagccagaaacggggactcaggatgggatcgaggtgtcacatcaaagtcattaacctggttgtgacgttgtcctgtggttttccaaactgttatcattcagagagactgagcagagtgtatgaggaaacatctgtgtaatttcttacaactgcaagtaaatctacaattatctcaattgtaaatgatacaatactcaaccaaaacatacaaccatcagccaggtgtggtggctcacgcctgtaatcccaactctttgggagtccaaggtgggagaattgctggaggcccggagtttgagaccagcctgggtaacataaagagacctcctctgcccccaccccaaattctacaaaaaaaaaaaatgttagatatgagctggccacggggtgcacgcctgtggtcccagctactcaggaggctgaggtcggaggatcgcttgagcccaggaggtcgaggctgcagtgagccaagatcacaccactgcactccagcctgggtgcagagcaagaccctgtctctaaaagaaaataaacagacaaaaaccacatacaactttgcttgttgtaaattatcttttaactgaatgccctggattgaatctggctgctgccatcccagggccagtgatttggatggggtatgaccctctgtgaggaaggagcaggcggtgggggaagggcctgggtgtccaggttccctgggaaggaaggctgagaaaaggagatgggggaggggtgcgcagggccggccagccaagggccccttagccccatctaccctgctccccggactccgcctgcctttcctcctcgtgacagaagacagtggaagcctactgggtggaaggcacgggcttaggatgtgtgtgggaggaaagtgtgtgtgctggggagcatgtatgtttgggagttgtgtgtgttggaaatcgtgtgttggggattgtgtgtatattgcagattttgtatgtgtgttggggattgtggtgtgtgggtgttgtagattgcgtgttggggattgtgttggggattgtgtatgtgttgggggttgtgtgtgtgttggggattgtgtgtgggggagattgtgtgtgtgtgctggggattgggtgtgttggggattgtgtgtgtgttgaggattgtgtgtgggggagattctgtgtgtgtgctggggattgggtgtgttggggattgtgtgtgtattgggaattgtgtgtgtgttgaggattgtgtgtgttggggatttgtgtgtgtgttggggattctgtgcatgttgggagttgtgtgtgagttggggacaatgtgtacagaggattgtgtgttggaaattttgtgtgtgcgttgggaattttgtgtatgtgttgtggattgcgtgtacgttggggattgtgcatgttgggaattttgtgtgtgtgttgagaattgtgtgtgagggaattgtgtgtgtttgagattgtgtgtgtattgggaattgtgtgtgtgttgaggattgtgtgtgttctgaggattgtatgtgttgggaattttgtgtgtgtgttgaggattgtgtgtgttggggattctacgtatgttgaaagttgtgtgtgtgttgggattgtgtgtgtgttgtggattgtgtgtgttgggaattgtgtgtgtgtgttgaggattgtgtgcagggggattgtgtgtgttggagattgtatgtgttgggaattttgtgtgtgtgttggggactgtgtatgttttggggattgtgtgtgttgggaattttgtgtgtgtgttgaggattgtgtgtggggggattgtgtgtgttggagattgtgtgtgtgttggggactgtgtgtgtgttggggactgtgtgtgttggggtgtggtgtgttggaaatcgtgtgttggggacaccgtatgtgtttgggggagggtgtcaataagtggtctggagtgtgatattggggtgcaggctccatgagtccccaccccacacctgagccctgggaccgcctatctgcttcggggtggggtcccaggaccctgtaggttcagcctactagtccaggcccaatgcccaatgcctgcatccctgcaggccctgtgctctccaggctcagacccctcgcagccctgcagaccctccctgggtccatgtgtctctttgcaggtgctccagcgagtagcaatgtggagagaccatcaggcagccctggcctcagtggccgcagtcccctggctccacgctgggcccaccccaccaggtctcctctcccatggcccaggggccttcagtgggactgagaggaggagggaaggagagtgggtgacagggaagaactgcagggagagaggagaggggtgggagaaggagaaggaaggaaggggtaggatggaagctgggtttctccctgtgcccgccccctactccaggacatgtgtccaagccctggcaggtggaattttgggggcagggccttggtggtgaggagaccttccaggggtctgatagcatctcccatctcagagcccacctcctgggcccagcctcccctccagcccacacagtggcattcccagtcctcagaggacagcttcgtcccacaaagctcagagccttgaggaaggcccactgctgccctggaacagagacagcattcaacagaggttggaacaaggctctacagggctgggggcagagggaggttctgtccagaatctgccttcaggacaagtacagccagcaggggcagcttagccacttatccactgcctgggcgaggcacagggctatggaggcacctaccaaccaacagttctccagccccagagccccagcccctgaggcacaagggtgggtgtgccaggagacagttgctgcgggccaccttagctgtctggcagcacagtgggtgctgccaggctccctgggggccccccgccaagcccacctggccagctgggccccccccacctccccaccaagccacccacacagcctcacatctctgagacccgggagtggccctttgttcataaacgagagcttcctcgccgtggccgcgcctcgcagacatcatctttgatgctctttttccactgtttcggtgctttaatgttttcccttcagagccgggccgagtgtctctcggagccaggcagccgcgccagctgtcaggcggtttctagcctcgcttcggttattttaagctgatgagcctgacgcatctcatcactaatatcagcagtttcatttctcctgttttccattcgctgtaataaaatgctcagcacagaatacaaggagataagcaagccatttcacaaacgccgggccgccagccaggcccaggcactggaccccctgaaccaccccaccctggcacgagtgggctggagggcagggccccggggaagaaggtcaaggctggaaggggaggtcagcctcacagccagcccctgccaccgccccagcccccccgtcaggctgttgcaggcatcacacggtggaaagatctggaactgtggccatggtgtgaggccatccacaaggtggaagctttgagggggagccgattagccatggacagttgtcattcagtagggtcacctgtgccccagcgaagggggatgggccgggaaggcagaggccaggcacctgcccccagcaggggcagaggctgtgggcagccgggaggctcccagaggctccgacagaatgggagtggggttgagcccacccctcactgcagcccaggaacctgagcccagagggggccacccaccttccccaggcagggaggcccggcccccagggagatgggggggatgggggaggagaagggcctgcccccacccggcagcctcaggaggggcagctcgggcgggatatggaaagaggccacagcagtgagcagagacacagaggaggaaggggccctgagctggggagacccccacggggtagggcgtgggggccacgggcccacctcctccccatctcctctgtctccctgtctctgtctctctctccctcccccaccctctccccagtcctaccccctcctcacccctcctcccccagcactgcctctgtcactctcgcccacgtggatgtggaggaagagggggcgggagcaaggggcgggcaccctcccttcaacctgacctgggacagtttcccttccgctcacctccgcctgagcagtggagaaggcggcactctggtggggctgctccaggcatg

SEQ ID NO: 11978 - DNA, 13525 bp, Homo sapiens
tgaagactatagcccctttcttttggctgatttctcccttttggaatgggaatgtttacccagtgctggtactcccattatatcttggaagtaaataacttgttttgattttacaggctcatagatggaaagagatgagtctcagatgagactttggacttggaatttggactttggacttttgagttaatgctggaacaagtcaagaccttggaggactgttgggaaggcatgattgtattttgaaatgagagagggacatgagatttgagaggggctggggcagaatgatatagtttgtgtacttatccccacccaaatctcatgtggaattgtaatccctagtattggaggcgggacctggtaggaggtgattggatcatgggggtggattactcatgaatcgtttagcactatctgtttgttgctgtccttgtgatgagtgacttctcatgagatctggctgtttaaaagtgtgtggcaccatgctttctcttgttcccggtctggtcatgtgacatccctactcccccttcaccttccatcatgattgtaagtttcctgaggcctcaccagaagccaagcagatgccagcatcaggcttcctgcaaagcctgaagaatcataagctgattaaatctctctctctttttttttgagatggagtctcatcctgtggcccacgctggaaggcagtggcactatctctgctctgaggctcaagtgattctcctgcctcagcctcctgagtagctaggattacaggtgcatgccaccacacccagctaatttttgtatttttagtagagatgaggtttcaccacgttggccaggctggtctcgaactcctgacctaaggttatctgtccacctcagcttcccaaagtgctgggattacaggtgtgagccattgcacccggcctcttttctttataaactacctagtctcagatatttctttttggcaatgcaagaatggcctaatacaccaagatttgtgttttcaccattttttttctgtttataaccatgttattttactgtttatctgagaaaagaacctggcctgttagtattttttatcgactgacaaactcaccagaataaagtgggtattaggacccttggttctgcaagattttggtaacagaatctgttttcactaattgttgggaaacagaaatgatattccttttagacctagctccctaaaccttttcctcgttttgctttttggtacaataatgagggctggcagggctacttgacaccattagcagtagacaaatttttcaataaggactaacagagaaaaactatggaaattctgatttattgtttggccgagagagttctctgtctccttgtgcccttgctctccatgtatattttatgagacatttcagcaaaggcatctctcaaaattaatcccatagctgtctccttcaattctcctccttgaaactcttcaccaatcttcatagggccttggccacttcttgagggccctcccaccagatgattaaaggcaatacagtgaacgaaagtcttattccgagacttgtctttgtaaacttagtgatccttcttccttttcacttacgaaaatttaaagagaagcagtctcaaatgtgaactgaatgccgtcccattactcccccaaactgggaagaagctggtcatatacttgcacatttatataataaatattcaaagactctaatctggtatcttccatataacacacactttaactcctattttaaactttcaaaaggctttttatggcatcttatgccctactttaaaatgtctgtcagcctaatatttctactttttttttattaatttattttcaaggtcatgtgtgaaaacaactttcagtgaaaagaacccatctgctttgacaaaaatgtacactataaaccttcacttctacaagggtctaaaaaaattcaagggtttgattcgaatgcttccaaaccacattccctaaagcatgctttgtgcaacactaggagttggtgcagcaaacaaaaacaaggaatggggagaggtgccaggcaggcgcggtggctcatgcctgtaatcccagcactttgggtgacccaggcaggtggatcacttgaggtcaggagttcgagatcagtcaacatggtgaaaccccgtctcttctaaaatacaaaaattagctaggtgtgtgtgcacgtaatcccagcactttgtgaggctgaggtgggtggatcacttgaggtcaggagttcaagaccagcctggccaacatggtgaaaccccatctctactaaaaatacaaaaaaaaaaattagccgggtatggtggcacacacctgtaatcccagccactcaggaggctgaggcatgagaattgcttgatccctggaggcagaggttgcagtgagcagagatcatgcctggggaaaagagagagactatgtctcaaaaaaaaaaaaaagaaaaaagaaatagggagagggagtgatgctacatactgaagctacctaccctctttaaaattcaaaatgcagattatcatcttaaagaattgtatgcattttaaagtgaaggtatttgtttaattttgtttaacctcttatttctcaaagttacttgattacagaattcttttcgggtatgcatgcaataccgagcaacatatgaccgagctagggttccatggtacacagtttggaacttgtgctagaaaatgttactcattattttataagaagtattattccaaggcatctatgcattggaaaataatcttgatatgaaatatgactcgatcccttctcataccatatttacagggtatggtggttaactttatgtgtccacttgtctcttagcccatcctgggttaagggatgcccagacagctggtaaaatattatttctgggagagtctgtgagagtatttctggaagagattagcatttgaatcaatagactgggtatcaaaaacccatcctcactaatgtgagtgggcatcattcaattaactgagcataggaatcataaaagaggtggaggaaggcaaatttgctctctcttctgaagctgggacatccatcatctgctcctgcccttgacttcagagctccaggttcttgagccttcaataccagcagacactcttcagcccttcagcttcacatgcaagaattacactggatttcctggttcttcggcttgcagggggcacatattggaacttcttggcctttataatctcctgagccaattcctataagaagtgtctttatatatctatatatatcccattggttctgtttgtttggaaaaccctgatacacagggctatctatagctcaccccccaagtactaagtctccagatgattattaggttcttataaacacaaaatatatatgcttattttgtaatatcaggttgttaacttcatctgagtagttttcagcacatatgatggggataagtcatcagttatgacagacaacttccggagttacatcaccaatgttcatctatcactcacctttgcttcaaactttatgcatcatattcaagttaattcctattgcatgtacttctgatttccacctacaaaatgaacattaaatttattatttccctcatttaaaaaaaaagatttcaggccaggtgcagtggctcatgcctgcaatcacagcactttgggaggctgaggcgggtggatcacttgaggccaggagttcaagaccagcctaggcaacatgatgaaacccctatctctactaaaaatacaaaatacaaaaaaaaaaaaaattagccaggtgtatgtgtgcctgcaatcccacccctactcaggaggctgaggcaggaggatagcttgagttctggaggcggaggttgccgtgagccaagatcacgccactgtactcaagcctgggcaagacagcaagactgagactctgtctcaaaaaaaaaaaaaaaaaaagttttcaaatcactttttctcctttgcagttcagcattgtcactaaaggtgtccaggttagacagaactgggtacaaaccctcctttctcttccccttactctttcacctcttcatttgtgacatgcaatgttaacccaatacaactcatgagtattcagagatcccgtctgtatacgtcctcagcctgacatactgtaatccttaggcatccttattagtaataagatgtccttgtgtgattttttcacaaacttttcacagaccctatctatgttcattcctggaacctctggcacattcttcttccttctcttcccaatctcaactttttcatcctctgaatctccctatactttccccgtggacaagcctctagaaatgttaaaatgtcagatcatgattggtaaatctgtagtgactaattgcccactgctgcctattccatctgacctaaattcctcaggtcttctaacattaagacctcttcctggccggttgtgctggctcatgcctgtaattccaacactttaggcagctgaggcaggcagatcacttgaggtcaagagttcaagaccagcctggccaacatggtgaagccctgtctgtactaaaaaatacaaaaattagccggacctggtggtgcgtgcctgtaatcccagctactcgggaggctgagtcaggagaatcacttgaacccggggcagcgggggaggctgcagtgagtggagatcaaaccaccgcactccagcccaggtgacagagcaagagtcagtctcaaaaaaaaaaaaacaaaaaaaaaaacctcttcctatagctaactcccacttaccacccccatcatgaacactcttgatgtatttacatggtttctccttcgaacatcctcctttcttctttcttaatggttgttatcaaataccctgataaaaaacaaaaacaaaaaacctcctctgaaggtcccttattcacccttccaacgctacaggtctgtaactctcattttctttttaaaaaatttttatttttttaatttattttattttttttttcagacggagtcttgctctgtcgcccaggctggagtgcagtgacacgatctcggctcactgcaacctccacttcccaggttcaagcaattctcctgcctcagcctcctgagttgctgggattacaggtgcctaccaccacacctgacctcaagtaacccacccacctcgacctcccaaagtgctgagaatacaggtgtgagccatcatgcctggccaaaatttttaaattttaaaaaatatattttattttttgtagagacagggtctcattttgagcccaaactggtcttgaactcctaggctcaagtgatcctcctgccttggcctcccaaaatgctgggattataggcacaagccaccaggcctgatccttacttttcttctgatgaattcacatatatgtgcacaaatactttatactaaattgtatttactgatgtacttttttcactgtgccttttctttttcttgcccagatatttttctcatataaacattagctccttaatgggagcaaatgaaccagtttttttttaattcccacccaaagtgagaatataaaaattttttattgatccaccaatactgaacactttcatttctaatagttatatttaactgaataaattacacacgggacaaaaatgttatttaagggataaagttgggtgtttgctcagggacaacgttgtatattgaatgatttggtgcttttgtgaatttatcattcaaaagaccatcgtgatggctaaataacagaaaggagagctttattggcaatatcaatttgcaaacccggaagacatagtcttcggtgtatgctgaatgtggtctctcttcaaaagagaggaaggacagttgggtttcatgcctcacagggtctgtttcacacagtggagtcatacatattcagcaggtttggaggaaaagatatacatatttatgaggggagctgagtgcatgtgcaatgggtaaatatgtatgtgacatcccatgtacactttggggcagggttttagtgttaaaatgaggtaaaatttggctctttacatcaaaaggtgaactacaggacccaaagacagtttgtgcacagcctctaataaactggctgacactggcttaaggtctgcaattgcttatcagaaaagaatgtttgtaaggctggtcctcattccaattagagttgtagtggtctgggttgtaaatcacaggatggggctgatagttcctattattagggagtttagagccatagaaattgagaaattggtcatgccagccagtccccgaaccctaaccctgtaggtaactttgtttccttaaccttacagtccatcttaggtgataaaggggtgtctgttttggtatctcacatcacaaattgttggttggtttgtgtgtttgtttcatcattcaggatgttgtttctttagggaatgtgaacctgaattctcaaggcttgttagactgtaatgttcccattcattttaggtttagctcatgcttctctagccacagccttcacttggattttaaaagttgaattactcatcaaagtctctaggacacgaaagacaatccttaggtatgatttgaccagtaaaaaagagatccagctgccttgaagcataagatcccctcggctccaatgtctatcactaatattcagtgtggcaaggatcccaggccacagagctgtggcttcctgcagctgctctggggagtgactctcttggagcatgtgatgtggtcttccattgtgcaggaccagcccagtggcatcctttcaacacctctggcaagcagcctttccaagcacgggtgccgtctgaaaacaggaggcatatctttcacatcctaggcacacgccctagggagtggtcagggttttgtccagttctcagcaaactagctacagctccatcccttactcccacactcaagagagatactagaatacaactgagagtagcctgatatgatgctaacctcgagttgcttttatttaaattaaaataaatcaaccagacacagtggctcatgcctataatccctgcattttaggagatcaaggagggtggatcacgagctcaggagtttaagaccaacctggataacatggcaagaccccatctctacaaaaagtacacaaattagctggacatggtagtgcgcacctgtagccccagctactctggaggctgaggtgaaggatcacttgagcccaggaggtagaggttgcagtgagctgagattgtgccactgctaataattaattaaataattaattaaattaataaatcgtgccactttattaaataaataaaacaagagtaaatcactcacaaatttggagcttttattagcaaaacattacttaggaaatctaaataaataacacggggttgacagccattgttctaactggcagcccctggcaagctcaaagccaggattatgctggtcacttaagtgacagctattgcgaattgttgttctctcaagaaaaaagaaccgatttctatggtaaaccaggcactgtgctgggtgcctttacaattcatcaccacaccacctaatgaaaggagcattcttcagaaactgtagtgctcaggctttctcaaggcctgagttcttttccaccagagcatattgttgccctattatccaaagttctctaaggaagagaactgacgtaagacccacatggctccattacatcttctggctacttgattgattttcatactccctacctctggggttggtatgtactatctatttctttctcctctcgttcttcctttttattccataaaatacaggaatattcctgtacattagtccttgcagcaaccttggaattactacattcctcaaacaagttatggaagccagctgccaatattggtccctggttaaacagtgaattctgttgttccatagagttactactgaaatacctaagccattttgtaaaatataatttagttgatctgaaggctgtctctaaagcagttttatgtagtgattacagagaaggactaatttcaagagtattttattgtttaaaaaaatgtaaacattttatggatgcactagtgaagtaaagaccaataaatgaagcagtaactttaataaaagggtaagtaaaatgtcacatcctctgcctatattcaggtctgttaggtatgtgtagttaaatgtaggtaagttagttgataattatttatttaagcatttctttatgtctactcattaaaaagaaaaaaagattaaaagaatgttactatgtgaaaaactgcccatcactggggaaaagaattttattatgcaaagcttcaacgctatttacagtttagacttttgtagctattgaaggctgacattgagataaagaagttaatcatgtccttctgtcttggaggaggtagaaagagatgagaatgaatacaattcaggatctacttctggtctttgatgaggagttagcacacggttctgggaggaaagacaggttaagaggcatgtgaaactctcaaatacgtcactgcgtctgccaacgtacatgatacccagcaagctcacatcttcatggaaagcatggtaattcccaacactaccggaagtctggagtggctaagtaatccatatattcaaccaggaagcagctaaagaaatattctaattacctaggaaggtttctgatttcaaaaggacatgaataaaaagtagaaggaatccactcccaaggacggacatcagagtagcttaaaatgtgagaataattttaggggaattttagaggtttggttatagacttatgttcccccaaaattcatatgttgaagccctaacccccagtaccttagaacatgactgtatttgggtagggcctttgaagagctaattaaattaaggccactggcgtgggccctaatataatctggctggtattcttgtaagaggaggagattaggacacacagaaataccagaggtacctgtgcagaggaaagaacgtgtgaggacttagcaagggtgcagccatctgcaagccaaggagacctctgaggattccaatcctatctgcatcttgatcttagacttttctggaactgtgagaaaataaatttcttggtttaagccacccagtctgtgatattttgttatggcagctctagtaaactaatacagattttaaatgtcattaaatgtcaatgtttaagctttgacaaaattttctaaaggaaagtataaaaggtcattttctttcttttcagagcctgatgattgcgggaggggtaagccagctgcatggggatcatgatgcaatgctgatgcaggacagacagaaagtagatctcttccatttctattttttttttttctgttgagttgaatgatcttcagactgaaaatgaaagaaaggtcactggaaataaaggccaaagatgagtgacaggattatagaataagtcttagctgttctaaagaaggacatattatgtacccccacccccaaattcatatgttgaagtcctaacccgacagtgtctcaaaatgtgaccatatttggagatagggtcaaagatgtaattaaggttaaatgaggtcattagcatggatcctaacccaatatctgctgtccttataacaagaggagattagggcacagtaagacacagagggaagaccatgtgagaatacagggagaaggtggccatctgcaagccaaggagagaggcctcagaagtaaccaactcagccaacacctcgatttcagacttccagcctcctgaaatgtgaggaaatacatttctggtgtttgatccatccagtctatggtaagttatggcacccctgcagggttcatctggctcagacttaacgattgcttttggtgatatttatagggcacagataacagcctaaacacaagacgacagaaacgcggcccagcagactatgcataaaatagaaatggggtatctggaccaattggagtctgcagtgggatgcggttactaaaacagtcaaatgcaacatgaggctccaggcagagtagtgggcaacatctcccatgttgcagcagtcagagcacacttcgagtactgtaaaaagacacagacaagccagaacacatttagagaatggccaaggtgtggaaggaaccagaaaccatgccattatgcaactgttgaaggaagtgcctgttttaccttgtgaagagaagactctagaggaagaagtagcatgaaaaccgctggcaaatttgtaaagatctgaagtgtggaaaagaattattctgcttggtcactggggatacaaggatatctgagtgggagtttaaaggcgggggatgtgagctttaaatgggataagaacattctagtaaccagaaatgcccaaagatagaatgcacagtctggagagccagtgaatatctcacaaatggagacacttgaaactaggatggggatgctgttgtaggaattccagcagacaagtggttgttggttccttccccaactttgtagggttataactagggatgttcctgcgttttctgcttggaggatctgcaagacacctcagggcaggaaatggcattaaatgcagaacagagctagtggctgaaaagcaaaaagccatcaggatctctgagtagtgaaggaaccagagaacatgcaggcaatgtccatcattctgacgcaatcagcagcataatcatcttcccccaggaacatcttgaccagggaatgtgtcagtgtggtgaatttcaacagtggaaagagaaactgctaaatctaagaactttaatttttatagattatgatctcatctctacaattttgaatttcatgctcaataaaagttccttactctctttttttttttttgagacggagtctcgctctgtcgcccaggctggagtgcagtggcgcgatctcggctcacttcaagctcagcctcccgggttcacgccattctcctgcctcagcctccccagtagctgggactacaggcgcccgccacgacgcccggctaattttttgtatttttagtagagacggggtttcaccgtgttagccaggatggtgttgatctcctgacctcgtgatccgcccgcctcagcctcccaaagaaaagtccctcactcttaaagttgcctcctccttcccagggctggcttcatgggcatgcaaccctggagagtctcacaggccctgcggtgggaggagccccatgcttggtttaacgctctgccattgccatcttaaaattcttaatttaattttttttcttttttttgaggtggagtctcgctctgtcgcccaggctggagtgcaatggcacaatcttggctcactgcaacctccgcctcccaggttcaagcgattctcctgcctcagcctctggagtagctgggattacaggcaggagtaaccacgctcggctaatttttgcatttttagtagagatgggggtttcaccatgttggccaggctggtctagaactcctgacctcaggtgatctgcccacctgggcctcctaaagtgctgggattacaggcatgagccaccaggcccggccttaaaattcttaataatgtaacaaagggtctcacgtttgcattttgcagtggactctgcaagatttgtagctttggaccacgtttctctttgcattcagataccttcttttttgccttatttgctcatgcagacccggaacaaatacggaattgcggtgggtaaatgtggtgcagaaagtgaacaactgggtttgtcctgtcactttaggcttttccctgctgtcccagcttcatgtcacttacttgctattagatttgggagttcattagcttcattttcctgatgtataaataggaataatagtaacagcctctttggcttttgtaggaagtaaatgacatgaagcgtataaacaaatactgcatgacaataaatatttgtccttatttgttgaggacatccaaaggacattcaggggcaaaagtaatccaagagtcaagactgaatgcctagtgcgggaaaagacacacaagacaacatttaggggagctggtacagaaatgacttcccaggaaggaagtctgtaccccgctggctgagccatccttcccgggcctaggcacccttgtcagcgcaatgagcaagggagagaaggcaggctgcagtgcagccctcagaagggccagagcactccctggcttcagtccttcgctccaagccctgtgtggagtgggctgtggcttggtaactaaatgctacttcaggtcaagagcaggggatatatctgggcagttctagagcattctaaactatctggacactaactggacagtggacggtttgtgtttaatccaggagaaagtggcatggcagaaggttcatttctataattcaggacagacacaatgaagaacaagggcagcgtttgaggtcagaagtcctcatttacgggggtcgaatacgaatgatctctcctaatttttccttcttccccaactcagatggatgttacatccctgcttaacaacaaaaaaagaccccccgccccgcaaaatccacactgaccaccccctttaacaaaacaaaaccaaaaacaaacaaaaatataagaaagaaacaaaacccaagcccagaaccctgctttcaagaagaagtaaatgggttggccgcttctttgccaggtcctgcgccttgctcctttggttcgttctaaagatagaaattccaggttgctcgtgcctgcttttgacgttgggggttaaaaaatgaggttttgctgtctcaacaagcaaagaaaatcctatttcctttaagcttcactcgttctcattctcttccagaaacgcctgccccacctctccaaaccgagagaaaaaacgaaatgcggataaaaacgcaccctagcagcagtcctttatacgacacccccgggaggcctgcggggtcggatgattcaagctcacggggacgagcaggagcgctctcgacttttctagagcctcagcgtcctaggactcacctttccctgatcctgcaccgtccctctcctggccccagactctccctcccactgttcacgaagcccaggtgggccgtcggccggggagcggagggggcgcgtggggtgcaggcggcgccaagggcgcgtgcacctgtgggcgcggggcgcgagggcccctcccggcgcgagcgggcgcagttccccggcggcgccgctaggggtctctctcgggtgccgagcggggtgggccggatcagctgactcgcctggctctgagccccgccgccgcgctcgggctccgtcagtttcctcggcagcggtaggcgagagcacgcggaggagcgtgcgcgggggccccgggagacggcggcggtggcggcgcgggcagagcaaggacgcggcggatcccactcgcacagcagcgcactcggtgccccgcgcagggtcgcgatg

SEQ ID NO: 11979 - DNA, 3324 bp, Homo sapiens
cgcccgccaccaccacgcagccgccgccgcccacgccggcctctgctgcccccttccccagcccttagcacagagagggacacatgcccctcccccagctgcgtttttttatagtagatttttaacaaaaaacggggagaaataatgcatttctgtggatacagtgcccaccgccctcctccacttggaaacggtatcctccctgcccatccgtctgtctgtcgcccttctcccggccctcactaagccccggcacttctagtggtctcacctggaggcaagagggaggggacagaggccctgccacgtcccgctgcctcctgctctctggaggtactgagacagggtgctgatgggaaggaggggagcctttggggggccacccggggcctggacctatgcagggaggccacgtcccaccccacctcttgtttctgggtccctgctcccctttgggggtgtgtgtgtgtgttttaattttctttatggaaaaattgacaaaaaaaaaatagagagagaggtatttaactgcaataaactggccccatgtggcccccgccttgtctgcttgtgtgtttgtccatctcaggagtggggagggggcctggggtctgcagagctccacgaggcatggttctgctgttgtgcacatggctgtgcatggtccctgccagctgcaccacccattacccagtggttggttggatggatggaggaattaaggaatgaatgtcccctttgaggccctagacgtgcatgagggtgtggggagctggggtcaaggacatgtcccatgttggaggagaggcaggggtctccgtgtcaacagttcctgaaaacacaaccagcccctggccctgccctgctgggccaaagccctcccctctgcaccagccaatagtggggcctggccttgagcccctcacccccagggagggcagatggccagggcgccaagcttggcccgtcagcctgtcgccttgcaccaaggctctggcgcctgtgctgtgacccctgcccctgctgatgatgaaacctgtcctcagctgagatgcagcgatgcctggtagggctgggggctgctcctgtgtctccccaggtgagcacacccctattcactgggccctgcttcagcctgcagcacccttcaactcccaggagctgggcttgccactctgctcaccttgtggagctccatctgcctttcctccccaattcccccactccctgcactcgtctcttcccacaagagccctgtctccttttcctagctattcccatctgaggccatctttattcatttagtttttagagacagggtttcactctcacccaggctggggtgcagtggcacacaatcacggctcactgcagccttgaccaactacaggtgcgtagcaccacagccaagtttttgtatagatggggtctcgctttgttacccaggctgtgacaagaggagcctcccacgtggtgtggatgaggaggcagatggcagggcctgtgcatttctgtgcttgagtgggccttgaaagtggttcagcaaccaggaagaagtgttcattcctcgacaacaacatccccgggctctggtgacttggctgacactggatggccctggaatgaaaaaggcaaagaggcaaaatgtgcaagggcccatctggaaccaaggtttgttgatcccctgggccgtgtgcaccctgagctgggcctggtagtggaaaggaatgaaggcactgcagtcaggcagcctgggttcatcccccagctagtggtgtcctaaggaaccggctccccaaaaacatccctggcttgtagtgcttgccaatttctgggtgtcaagactcccactgctgctgatttcaggataccagcatgatgccactgaatgcagagtttcgagatgtgcatggtctgctatgttgagccaggtctagcataccgctgtgccctgctgtgttttaggggagatggggaaacctggtgggtaagagcaaaagccctggagtcaggctgtccaggctagaatctcagctctgcctctggctgagcaagcttgggccatgccctgatctctgccttcagtgccttttctgtaaagtgaaggaaatgagtgtccgacggggaggaggttcctaaaagggagcagggtctggggagcccaggcctctggggttgggtgactgagaaggcagcccctgaatacagagcagagctgaaggtggggcagtaagtgctgctgggagaacaggcagcacaggctgagttggtgcagaagtgagtcaacatatgtgccatcgtataaaatgtactcatcggactgtagatgttagctattactattactgctattttatgttttatagacagggtctcactctgtcacccaggctggagtgcagtcacacaatcatagctcactgcaacctcagcctcctgggcttaagcgatctgcctcagcctcccaagtagctgggactacagatgtgtgccaccacgcctggctaaatttgtttaaaattttttttgtagagatggggtctccctatgttgcccaggctagtcttgaacttctgggctcaagcgaccctcctgccttggcctcccaaattgctgggattacaggcataagccactgtgctgggccatattactgctgtcatttatggccaaaagtttgctcaaacattttccagttaccagagccacatctcaagggtctgacactgggaaaacaccacgtgcggatcgggcacacgctgatgcttgccctgctcagggctatctagtgttccctgccagaacctatgcacgtgtggtgagagcttaaagcaatggatgcttcccccaacatgccagacactcctgaggagcctggcggctgctggccatgccccgtgtgcatgtaggcgatggggaagtgagtggaggagagcggaaccttgattctgctcatcaaactgcttaaccgctgaagcaaaagggggaacttttttcccgatcagcagaatgacatcgtgatggggaaagggctccccagatggctggtgagcagtgtgtgtctgtgaccccgtctgccccaccccctgaacacacctctgccggctgagggtgacacaaccctgttccctgtcgctctgttcccgcttatctctcccgccttttcggcgccaccaccttcttggaaatgagacagagcaaaggggagggggctcagaccaccgcctcccctggcaggccccataaaagcgactgtcactcggtcccagacaccagagcaagctcaagacccagcagtgggacagccagacagacggcacgatg

SEQ ID NO: 11980 - DNA, 3215 bp, Hepatitis B virus
ctccacaacattccaccaagctctgctagatcccagagtgaggggcctatattttcctgctggtggctccagttccggaacagtaaaccctgttccgactactgcctcacccatatcgtcaatcttctcgaggactggggaccctgcaccgaacatggagagcacaacatcaggattcctaggacccctgctcgtgttacaggcggggtttttcttgttgacaagaatcctcacaataccacagagtctagactcgtggtggacttctctcaattttctagggggagcacccacgtgtcctggccaaaattcgcagtccccaacctccaatcactcaccaacctcttgtcctccaacttgtcctggctatcgctggatgtgtctgcggcgttttatcatattcctcttcatcctgctgctatgcctcatcttcttgttggttcttctggactaccaaggtatgttgcccgtttgtcctctacttccaggaacatcaactaccagcacgggaccatgcagaacctgcacgattcctgctcaaggaacctctatgtttccctcttgttgctgtacaaaaccttcggacggaaactgcacttgtattcccatcccatcatcctgggctttcgcaagattcctatgggagtgggcctcagtccgtttctcctggctcagtttactagtgccatttgttcagtggttcgtagggctttcccccactgtttggctttcagctatatggatgatgtggtattgggggccaagtctgtacaacatcttgagtccctttttacctctattaccaattttcttttgtctttgggtatacatttgaaccctaataaaaccaaacgttggggctactcccttaacttcatgggatatgtaattggaagttggggtactttaccgcaggaacatattgtacaaaaactcaagcaatgttttcgaaaattgcctgtaaatagacctattgattggaaagtatgtcaaagaattgtgggtcttttgggctttgctgccccttttacacaatgtggctatcctgccttgatgcctttatatgcatgtatacaatctaagcaggctttcactttctcgccaacttacaaggcctttctgtgtaaacaatatctaaacctttaccccgttgcccggcaacggtcaggtctctgccaagtgtttgctgacgcaacccccacgggttggggcttggccataggccatcggcgcatgcgtggaacctttgtggctcctctgccgatccatactgcggaactcctagcagcttgttttgctcgcagccggtctggagcgaaacttatcggaaccgacaactcagttgtcctctctcggaaatacacctcctttccatggctgctaggctgtgctgccaactggatcctgcgcgggacgtcctttgtctacgtcccgtcggcgctgaatcccgcggacgacccgtctcggggccgtttgggcctctaccgtccccttcttcatctgccgttccggccgaccacggggcgcacctctctttacgcggtctccccgtctgtgccttctcatctgccggaccgtgtgcacttcgcttcacctctgcacgtagcatggagaccaccgtgaacgcccaccaggtcttgcccaaggtcttacacaagaggactcttggactctcagcaatgtcaacgaccgaccttgaggcatacttcaaagactgtttgtttaaagactgggaggagttgggggaggagattaggttaaaggtctttgtactaggaggctgtaggcataaattggtctgttcaccagcaccatgcaactttttcccctctgcctaatcatctcatgttcatgtcctactgttcaagcctccaagctgtgccttgggtggctttggggcatggacattgacccgtataaagaatttggagcttctgtggagttactctcttttttgccttctgacttctttccttctattcgagatctcctcgacaccgcctctgctctgtatcgggaggccttagagtctccggaacattgttcacctcaccatacagcactcaggcaagctattctgtgttggggtgagttgatgaatctggccacctgggtgggaagtaatttggaagacccagcatccagggaattagtagtcagctatgtcaatgttaatatgggcctaaaaattagacaactattgtggtttcacatttcctgccttacttttggaagagaaactgtccttgagtatttggtgtcttttggagtgtggattcgcactcctcccgcttacagaccaccaaatgcccctatcttatcaacacttccggaaactactgttgttagacgacgaggcaggtcccctagaagaagaactccctcgcctcgcagacgaaggtctcaatcgccgcgtcgcagaagatctcaatctcgggaatctcaatgttagtatcccttggactcataaggtgggaaactttactgggctttattcttctactgtacctgtctttaatcctgattggaaaactccctcctttcctcacattcatttacaggaggacattattaatagatgtcaacaatatgtgggccctctgacagttaatgaaaaaaggagattaaaattaattatgcctgctaggttctatcctaaccttaccaaatatttgcccttggacaaaggcattaaaccgtattatcctgaatatgcagttaatcattacttcaaaactaggcattatttacatactctgtggaaggctggcattctatataagagagaaactacacgcagcgcctcattttgtgggtcaccatattcttgggaacaagagctacagcatgggaggttggtcttccaaacctcgacaaggcatggggacgaatctttctgttcccaatcctctgggattctttcccgatcaccagttggaccctgcgttcggagccaactcaaacaatccagattgggacttcaaccccaacaaggatcactggccagaggcaaatcaggtaggagcgggagcatttggtccagggttcaccccaccacacggaggccttttggggtggagccctcaggctcagggcatattgacaacactgccagcagcacctcctcctgcctccaccaatcggcagtcaggaagacagcctactcccatctctccacctctaagagacagtcatcctcaggccatgcagtggaa

SEQ ID NO: 11981 - DNA, 4503 bp, Homo sapiens
ggtggatctccacatgcagaagaatgtagctggacccataccttacaccaaatgtttgttgtgagtttatttacttttttgtgtgtgtggagacagggtcgtgctatgttgtccaggctgatctagaactccttacctagagacactgccaaggtaagtgagggccaagtggacactgagtgattctgtgcctcactgagcaaaaataactaaacatgggcgaaggagagcccaatgatcccagggacaaaatgtcatcacgggcattctgcgcacgcttgccaggatacaggagaagcaaccagacacttcattcatcttctcagaatgttcattaacatgttcagaaaggtggaaaaccttacttgctaaagagaaggaaattggaggcatggccaaaagtattcaaggccctttatgaaaaagaaatgaaaactgatatccctcctaaaagagaagtaaaacagaaattcagagattctaatgcacccgaaaggcctcctttgggctttcactttgtgttctgagtactgccctcaaatcaaaggagatcccggtctgtccactggcagtgatgccaagaacctgggagggacatgagtgaccatgctgcagatggcaagcagcccaaaaagaaggcttctcaactgaaggaaaagtaccaagagcagaatgctgcatatccagccaaaggaaagctgatgtggcaaaaatgatgctgtcaaggccgaaaaaggcaagaaaaaaaaacaaagcggagaaagacagagaaggtaaggaaaataaaaaatgaagtcgatgataatgacaaataaggtggttctatggcagcttttttttttttctcttgtctataaagcatttaacctacctggacacagctcattccttttaaagaaaaaaattgaaatgtaaagccacctaagatttatttgtaaactgcatgatggcgttctttttctgtttttgtattattaacaagaattatcaagtaattcttcagacaaccctgtcctggtggtattttgtatagccaccaactttgcctggtatactataggggttataaatcagcatgggaatttcaaatttaaggcacagtataagttagttatatacaaatgtgaagtaacattattaattaaactgttggcctgtgcgaagggagggccaactgtgggattcagtcattcattcaacaaatattggtgagtgcctgacactgttccaggcactgaggctattgcaacaaaacagacacaagctcctgccctcatggagcttacattctggtgagggatacagagccaccaaaaaggatggcagctgggccatgagaaaggatcaaagtcaggaagttagaattcggggatggattgaacatgggacaaaagagaagagtcaagttgactacaaagcatttggcctaagtaatgcaaagaatggtgggccatttcctgagatgggaagcactagggtagttttggacataaatggagatgcatataagccatccaaactgaaatattgagaaggcagtaggtgatagttggctttccttaggttctagggcaggaattcttaaccttttgtgtgtgtgcctaggacccctttggtggtccatgaagccctttccagaataaatattgtggaggaacctaccttaatgcaatagtagcttctaggtacattatcaggcaaactatcccacaagttacaaaacagaaagcctcacagaccaaattatgatgcttgaattgcagggtttattgaatcagtttaaaaccacttacagcaagaactcgatggggtgcataacatacacaggatagggtacaggcgaggcagatggaccacaccaccagaacctagaattagggaatcctcccctcccctcccctcccacccctccccccttccccctcccctcccctcccctcctcccctcctctcccatcctcccctcccctcccatcctcccctcccctccccttttctcttcttttctttttttgagactgtctcactatgttgcccaggctggagtgcaatggcgtgatctcggctcactgcaacttccacctcctgggttcaagcgattctcatgcctcagcctcccgagtagctgggattacaggcacgcaccacaatgcccagctaatttttgtattcttagtagagacggggtttcaccatgttgaccaggctggttttgaactcctgaccttaggtgatccacccgcctcagattcccaaagcgctgggattacaggcatgagccactgcacctggctaatattgatatgttttccctctctctgccgcatcagcctgtcccactgacagagttgaggatgctcaaggcggctcaacagagggtacctggagcaactcacactgcactatcagagagacacaagtgcaagcacactcagccacagctgcagctcaccaatcagcctgctgaacagacctgaactttagctgcatttttggggcagagcatatgggtgccaggatgggaccataatcttatcaccaatgagtggccatttagggatgatatagttgtcaacccagagatggcatgatcatgccttttgacttggtcattctctaagtaaaacttttatttgttccatcatattttccacttattctgtttaccttcaaaatatcttttttttttttttttgagacagggtcacactgtcacccaggctagagtccagtggcactatcatggctcaccacagcctcaaccttcagggctcaggtgatcctcccacttcagcctcccgagtagatgggactacaggcacctgccaccacccccagctaatttttgtagagacaaggttttgccatgttgtccaggctggtcttgaactcctgggctcaagggatccggccacctcagcctcccaaagtgctaggattataggcatgagccactgtgcccagcctaccttcaacgtatctaactggttactaacttttaggattcggcctatgtctcacaaccttcttgcttactcaacatccttgtctcttaagccactagcttcttctctatggttaacactttttatgagttttattcatctgcttatttttcttatcctctataccagaattgaatattttcaaataaagcacactcatgttacaatctttgaaatgaaaaaaaaaaatgcataggattagaaaagaaaccaattttaataaactatattttgaagtatagttctatattaaacaacaagatctaggccaggtgcagtggctcatgcctgtaatcccagcaatttgggaagtcgaggtgggaggattgcttgaggccaggggttcaagaccagcctgggcaacatggagagattccccatctctttctttacacacacacacacacacacacacaaaatatctgatagcaacaggtgcagtcattaccacaatttcgagtagtgatgagcttaataatatttcgagttatcaccaacaactgtaaagtaacatgaaaacgtctgtgatgactattgcccacaaagtcacaggtactgctaatactcctggtatttgtagtcaaattcataataaaggaaatgctaggtttcagttggtattttgtcccgacggtctgtggacggcaggttagaacgcccgtccaagccaggagggtggacctagcactgcagggtccacctcgggccaatcaactatattcccgaggcgggggcctgcgcttcccggacccagctgccctcaggggagagaggacacacttaagagtttggggccggcgtggtagctcatgcccctgatcccagcacttcgggaggctgaggcgtgaagatcacttgtagcaggagtttgagaccagtctagccaacttggcgagaccctgtccctaaaaaaaatttttttttaattagccagttgtggtgagcgcctgtagtcccagctactcgggaggctgaggtgggaggatcgctgggctcaggagttccagactgcagtgagccatgatggcggcactgcactccagcgcggtgagactcagtctcaaaaataaaagggggaggggttgggggtaaaattagttgtgaaatcaagtaagacttcctgggacagaacaatcaaaggggtggcgccgggtcctccaaagagctactagctcagcccaagccccgcctcggcccccagggcagcggcccgcagagctccacccggcaggcgcccgggaaactccgccccccggccggcagggggcgcgcgcgccgccggccccgccccgtggacgcgggttccgtgggcgttcccgcggccaggcatcagcaatctatcagggaacggcggtggccggtgcggcgtgttcggtggcggctctggccgctcaggcgcctgcggctgggtgagcgcacgcgaggcggcgaggcggcagcgtgtttctaggtcgtggcgtcgggcttccggagctttggcggcagctaggggaggatg

SEQ ID NO: 11982 - DNA, 3047 bp, Homo sapiens
ctcactgtctctctctctctctctctttctctgcaggttctccccatgacaccacctgaacgtctcttcctcccaagggtgtgtggcaccaccctacacctcctccttctggggctgctgctggttctgctgcctggggcccaggtgaggcagcaggagaatgggggctgctggggtggctcagccaaaccttgagccctagagcccccctcaactctgttctcccctaggggctccctggtgttggcctcacaccttcagctgcccagactgcccgtcagcaccccaagatgcatcttgcccacagcaccctcaaacctgctgctcacctcattggtaaacatccacctgacctcccagacatgtccccaccagctctcctcctacccctgcctcaggaacccaagcatccacccctctcccccaacttcccccacgctaaaaaaaacagagggagcccactcctatgcctccccctgccatcccccaggaactcagttgttcagtgcccacttcctcagggattgagacctctgatccagacccctgatctcccacccccatcccctatggctcttcctaggagaccccagcaagcagaactcactgctctggagagcaaacacggaccgtgccttcctccaggatggtttctccttgagcaacaattctctcctggtccccaccagtggcatctacttcgtctactcccaggtggtcttctctgggaaagcctactctcccaaggccacctcctccccactctacctggcccatgaggtccagctcttctcctcccagtaccccttccatgtgcctctcctcagctcccagaagatggtgtatccagggctgcaggaaccctggctgcactcgatgtaccacggggctgcgttccagctcacccagggagaccagctatccacccacacagatggcatcccccacctagtcctcagccctagtactgtcttctttggagccttcgctctgtagaacttggaaaaatccagaaagaaaaaataattgatttcaagaccttctccccattctgcctccattctgaccatttcaggggtcgtcaccacctctcctttggccattccaacagctcaagtcttccctgatcaagtcaccggagctttcaaagaaggaattctaggcatcccaggggaccacacctccctgaaccatccctgatgtctgtctggctgaggatttcaagcctgcctaggaattcccagcccaaagctgttggtctgtcccaccagctaggtggggcctagatccacacacagaggaagagcaggcacatggaggagcttgggggatgactagaggcagggaggggactatttatgaaggcaaaaaaattaaattatttatttatggaggatggagagaggggaataatagaagaacatccaaggagaaacagagacaggcccaagagatgaagagtgagagggcatgcgcacaaggctgaccaagagagaaagaagtaggcatgagggatcacagggccccagaaggcagggaaaggctctgaaagccagctgccgaccagagccccacacggaggcatctgcaccctcgatgaagcccaataaacctcttttctctgaaatgctgtctgcttgtgtgtgtgtgtctgggagtgagaacttcccagtctatctaaggaatggagggagggacagagggctcaaagggagcaagagctgtggggagaacaaaaggataagggctcagagagcttcagggatatgtgatggactcaccaggtgaggccgccagactgctgcaggggaagcaaaggagaagctgagaagatgaaggaaaagtcagggtctggaggggcgggggtcagggagctcctgggagatatggccacatgtagcggctctgaggaatgggttacaggagacctctggggagatgtgaccacagcaatgggtaggagaatgtccagggctatggaagtcgagtatggggacccccccttaacgaagacagggccatgtagagggccccagggagtgaaagagcctccaggacctccaggtatggaatacaggggacgtttaagaagatatggccacacactggggccctgagaagtgagagcttcatgaaaaaaatcagggaccccagagttccttggaagccaagactgaaaccagcattatgagtctccgggtcagaatgaaagaagaaggcctgccccagtggggtctgtgaattcccgggggtgatttcactccccggggctgtcccaggcttgtccctgctacccccacccagcctttcctgaggcctcaagcctgccaccaagcccccagctccttctccccgcagggacccaaacacaggcctcaggactcaacacagcttttccctccaaccccgttttctctccctcaaggactcagctttctgaagcccctcccagttctagttctatctttttcctgcatcctgtctggaagttagaaggaaacagaccacagacctggtccccaaaagaaatggaggcaataggttttgaggggcatggggacggggttcagcctccagggtcctacacacaaatcagtcagtggcccagaagacccccctcggaatcggagcagggaggatggggagtgtgaggggtatccttgatgcttgtgtgtccccaactttccaaatccccgcccccgcgatggagaagaaaccgagacagaaggtgcagggcccactaccgcttcctccagatgagctcatgggtttctccaccaaggaagttttccgctggttgaatgattctttccccgccctcctctcgccccagggacatataaaggcagttgttggcacacccagccagcagacgctccctcagcaaggacagcagaggaccagctaagagggagagaagcaactacagaccccccctgaaaacaaccctcagacgccacatcccctgacaagctgccaggcaggttctcttcctctcacatactgacccacggctccaccctctctcccctggaaaggacaccatg

SEQ ID NO: 11983 - DNA, 4504 bp, Homo sapiens
ctttcctccaaggactgaaacagacaaggataccccctcttaccactgttattctacatagtgcagaaagtcctggccagagctatcaggcaagaggaagaaaggaagggtatccaaactggaaaggaagaagtggtgagaaagttttaattttatttttttgcatgtagttattaagttttcctagcaccatttattaaagagactgtttttttccattgtatgttctttacagctttgtcacagattagttggttgtaagtgcatggatttatatgtggattctctattctgctccattggtctatgtgtctgtttctatgccaatactgtgctgttttggttactatagctttgtagtaaattttgaagttaggtagtgtgatgcctccagctttgttctttttgctcaggattgctttggctattcagggtcttttgtggtttcttataaattttaggaatttttctgtttcgtgaagaatgtcatttgtattttgataggaattgcattgaatctgtaaattgctttaggtagtattgtaattttaacaatattagttcttccagtctatcacggagtatatttctgggtttttgtgtcctcttcgatttcttttatcagagttttatttatagtttttccttgcatagatattttacttttttagttaaattgattcctaggtattgtacatttttgtagctattgtaaaaggaactgctttcttgatttttattcagattgttcactgttgtcatataaatgctattgatttttgtatgttgattttgcatcctgcaactttactgaatcagatctaacagcttttaggtggactctttagatttttctaggtataagatcatgtagtctgcaaacaaacctaatttgacttcttcctttccaatttggatacccttcctttcttcctcttgcctgatagctctggccaggactttctgtactacgtagaataacagtggtgagagggggtatccttgtctgtttcagcccttggaggaaaggccttcattttttctgtgttcagtatgatgttgactgtaggtttgtcatatatggccttcattattttgaagtatgttccttctatatccattttggtgagaatttttatcataaaggaatgttgaattttatcaaatgctatctcagcatctattgaaataagtataccgtttctgtttttgattctgttaatgacttatatttagatggtatttaaagacataggaaatgggttagatctcctaaagagggaagatggaaagagaatgaaagagtttccagaatatagccctgggggtttcccgcacttatggcggagggaagggagccatcagaggaaactcagagtggccagatagaaaggcaggaaaaagcttaataaggtggtatcatgagaagagagtcttcctagaaggagaaatgcttactcttgataaaaactgaaaaatagggtgagtccacattagaattctcgctactggggaggactttctacacaaggttagagatcacttgtattttgtctactataattttagtgcataatgcatttttttggcatatagtgggcacttatatacatattaatctgatgacatttaataattgagtgcccaaatatttatgtcgagttgagagctagggataggcatgagtctttcttaaacatccttctcttctccttcctccaccccctcacttgccttcagaagcattgatcagagagatagcagtatcttcagttttttttaaagcaacatgaaacacactttattcctgctaacattaggaaaagcgagctgttttccaagccctggaggaaggaaattcagctaactaacgtgaggtaatgtagggtggctatttcttgaaaggtagtgaatcataactataaccatactatggaaaaaagtcctgccttaccaaccactccactgactgcttgtcaccaaaactacgctatgaaacgaattgtgttgagtggctttcattgtaaaagattttggtgaagggagggaaagaaactggtaggggttcagatcagaagatctggctttgccagtttctggagggtgtcagaatggcttcaacatacctacttccttggcctcaactggaggttttgtagctgtaaacaagaaggattgcatagttcagaataacgacactgtaagctcattgtggaactgggttaaaatcagcatgtagatctactaagaaagaaacacactcagcactactacagaaagaaacagccatgggccctgattgttagctttctggaagccatttcatttttacaatagatttatcacacactgtattgactttttccagtatagagtaagagaaagttaatattcctcatgttttgtctgttgacagactgaaaataattgcattgagtttggctagaatatcctgtcattccataaacatctcaaactccacatggctaaaacttaacccatccatgcccccatctgcatgcacacatacatgcatataacttcatttctcagtgtttttttctccatgaatggtagcaccattctctttcaagaaagagaaatacttccccttgggattatcctatctctacttattgctgcaggggcttccaaaattaggttttctgtgttcagtcttgcattcacacttctgaaacccagagctgaccgagacaaattcttcaacttcctgtcagtcccaacatagatttaaaattcctaacctggctcatgaggttcaccatgtattcctgcttccctaagtcagcctcatatcacaccaacctgtgtgtggagtggctaaatactctagccaggcaagctctctcagttcttctacctggctcctctggagccctccttattgctcatcccattcttagcctgattcaagattcctggtccttcaaatctctctttaagtgtccttacctggatctttctctagttagtacaaatttttctatctaccattggagcgaacattttttgaaactttgtatcagtcctgccttactcttggtggaatcctgtggtcctagtcaagtgcctgctccatgaatgtgctgaataaatgaataagcattttaattgtgtatctgtcattagtgtcagatgtgttatttattccagcatggttttagcacacagacacactctttgatgcagacttttcttttctttttacatatagcaacaataaaaaactagactttcatctcctgaaaatatcagtctaataatcacctatggctgtctctctggttgctgaaggaaaaaaaaaaaaaaggcagggcacacctggattgcattagaatgagactcactacccagttcaggtgtgttgcgttgtgggtctccggcacatttcagaggctcattaggaccctgaccccacactggggtttacacccctaaaagcaggtgtgtcccgtggcaactgagtgggtgcgtgaaaaggggggatcatcaattaccagctggagcaatccgaatcggttaaagtgaatcaagtcacagtgcttccttaacccaacctctctgttggggtcagccacagcctaaaccgcctgccgttcagcctgagaggctgctgctagcctgctcacgcatgcagcccgggctgcagaggaagtgtggggaggaaggaagtgggtatagaagggtgctgagatgtgggtcttgaagagaatagccataacgtctttgtcactaaaatgttccccaggggccttcggcgagtctttttgtttggttttttgtttttaatctgtggctcttgataatttatctagtggttgcctacacctgaaaaacaagacacagtgtttaactatcaacgaaagaactggacggctccccgccgcagtcccactccccgagtttgtggctggcatttgggccacgccgggctgggcggtcacagcgaggggcgcgcagtttggggtcacacagctccgcttctaggccccaaccaccgttaaaaggggaagcccgtgccccatcaggtccgctcttgctgagcccagagccatcccgcgctctgcgggctgggaggcccgggccaggacgcgagtcctgcgcagccgaggttccccagcgccccctgcagccgcgcgtaggcagagacggagcccggccctgcgcctccgcaccacgcccgggaccccacccagcggcccgtacccggagaagcagcgcgagcacccgaagctcccggctggcggcagaaaccgggagtggggccgggcgagtgcgcggcatcccaggccggcccgaacgctccgcccgcggtgggccgacttcccctcctcttccctctctccttcctttagcccgctggcgccggacacgctgcgcctcatctcttggggcgttcttccccgttggccaaccgtcgcatcccgtgcaactttggggtagtggccgtttagtgttgaatgttccccaccgagagcgcatg

SEQ ID NO: 11984 - DNA, 3258 bp, Homo sapiens
aactgggcaggcctcaggaaacttacaatcatggtagaaggtgaaggggaagcaaagcaccttcctcacaaggcgtcaggaagaagtgccaagcaaagggggaaaagccccttgtaaaactaccagaacctgtgagaactcaatcactatcacaagaacagcatgagggaaccgcccctcgtgattcaattacctccacctggtctctcccttgacacatggggattatgggtgttacaattcaagatgagatttgggtggggacacaaagcctaaccatatcaaggatcaagtggtgggttgaaactaacaggatgagatatatcagatacaaacacagggtcccatatttgggttaaaattcataaatgatcaaagcacaggatgacagataatataggtcattttagattattgtggccaacagatcacagtgggtagtgttatgacgaagggagggtcacagttactacagttacagatggattctgggtacaacatttgcactaaagtgcctttgccaagggaggcaacagtctcgacatcctgtggcctgatctacttcagggactgtgtcttgttcagagcatcacatttgaagagaactttgaccaaggggaatatgccagaaaaggaagttcgggatgctgaggatcttaggaactatgtctaaacaagattcattcacagaagtgggaatgtctatttggcaaaaagaaaatactacttacatggctgttggaagaccagcaatcacaaactcagtttttcaaaaggctgggcagaaacacagatgaaagaaacaggccatgtttaagaaaagataaaagctcacgcatgatatgccactagagaatcacctagcctcagtgttggcggggaggcctggggagtcttgatgtctgagagtgacattctgatgatcactgtcatgtgtaaatgttggcctaaagctgccaatatttttgatttaagagaagcaagaaatgcaaatttttatgcagcatgtctcaatttttaattttggcaactattacaaaatgtttaaagagactctgtgcagcccaaatataacatatctatgggctgatggcagcccagcgttgccagttcacagggtctacaagagatgattcttagtttcaacagggtgcagtgctgaaacgcgtgcacagtagattttgcttcggttatgaaagaacttccaaatatttatgattcatagccagagaaaaggctctctatccaggttctgaacaataggaaatcatcaagaggatattggatgacaatatatgaaagatgttatttgagaaaggattctctcctgaggcatagatgttgaaccaaattctattagttatgcttttacagcaagatagtggtttacagcttacaaaaggcttgtacatcctctcatattaaaagttattagaacagtcctttgaagtagaaaagtaggcatttctattttacaaacgagttggccgagtatctgagatagtagataactcatagaaggtcatccgggaaacggggcagcagaactgggatcgaatgactctggtcatccaactccaaatgcaaaagtctttctgctgctgcttcctagttaaactctaagggtctaagactccattcctagttatggtctcaactacatttgctcattgctgtgaggggtcaacccacctcccggagtcctctcctgcacattctcatgttcctgaaaggcttttctgtcccttccactactccctgtaagctcctgtgcttcacaatttcttgttgaattttttctaatctgactctatcagttatgggaatgttccctcaattcttagtgctccaaaccggacttgctcttggcttgtatttgtccaaaatatttgtcttctctatgttttctacatgtttgtcttataaggacaaaaacctgccttagtttatccatgaacaaagccacgcatgctagtggacacacacacacatgcgcgtgcgcgcgcacacacacacacacacacatacacacagagactttgtatgtgagtaatgaatcatcaaatcatcataatttctggacttgtattaataagtcggccaggaggaaaagaatctgctgtcaatcatggcttctggttctcacagtcatctctactttcttccagcaagtttggttctgtcaaaaaccagctgtcagccttgttcctgcatgcccaatgcagaagagtcagtaaagaagatttggttctctgtatttcaggggcatcaatgccaggttgaaatatgccattctggcccagctcagtggctcacacgtgtaatcccagcactttggaaggccaaagcgggtggattgcttgagctcaggagttcgagaccagcctgggcaagaggctgaggtgggaggatgacctgagcccgggaggtcaaggctgcagcgagctgtgatcgtgccactgcactcgagccagggcgttggagtgagaccctgtcaaaaaaaaaaaaaaaaaggaaggaaaaaaggaaggaaggaagggagggagggaagatgccattcttagattgaagtggactttatctgggcagaacacacacacacatacacacatgcacacacacattgtggagaaattgctgactaagcaaagcttccaaatgacttagtttggctaaaatgtaggcttttaaaaatgtgagcactgccaagggtttttccttgttgacccatggatccatcaagtgcaaacattttctaatgcactatatttaagcctgtgcagctagatgtcattcaacatgaaatacattattacaacttgcatctgtctaaaatcttgcatctaaaatgagagacaaaaaatctataaaaatggaaaacatgcatagaaatatgtgagggaggaaaaaattacccccaagaatgttagtgcacgcagtcacacagggagaagactatttttgttttgttttgattgttttgttttgttttggttgttttgttttggtgacctaactggtcaaatgacctattaagaatatttcatagaacgaatgttccgatgctctaatctctctagacaaggttcatatttgtatgggttacttattctctctttgttgactaagtcaataatcagaatcagcaggtttgcagtcagattggcagggataagcagcctagctcaggagaagtgagtataaaagccccaggctgggagcagccatcacagaagtccactcattcttggcaggatg

SEQ ID NO: 11985 - DNA, 4518 bp, Homo sapiens
gccacatttgccatatcgattctgcagcagattgaattagatctaaaagccacccaggccttggtcctagcacccactcgagaattggctcagcaggtaagagtggcttctattccctccttcagggctgatttagggatgatgagtataatccaaggaccagagaagtcttctctgatcaccaccttgggaggaagacatgggtgccctaacactctcgagacctgctgggttaattaaaagctatttcttacccaaacgtaaccattgcttcctccacccatttcctgagtcaaatgggaaagctgttgggtgaagcctggctggctgggcaagtttgactgtgttctgaataagcaccttcactatgggctaagagatcccttggtgtgggggtgatcttacagtagtcagagcagatggacagtccttttcacccttgcttaatagccagagctgtttcatgcctggggcacacacaattctaatgctggactttttcctgggtcatgctgcaacactgatgtcagagcatgtttttaaatgttctgtggcaggggcagtgattattctgggtgtggataatgtaagaagttacagcagagctccattctaaggcacttggctctcagttttctcagagtgaacatgcctcgtagcttgggtcctatggcaggagtgcaataggacatggatatgcatcacctgttctataaaactggttgctggctgggtgtggtggctcaactcgtataatcccaacactttgggaggccaaggcaggcagatctcttgagatcaggagttggagaccagcctggccaacatagtgaaaccccgcttctactaaaaatacaaaaattagccaggcatggtggcgtgtgccttttatcccagctactcgggaagctcaggcaggagaatttaacccaggaggtggaggttgcagtgagctgagattgtgccattgcactccagcctgggcaacgagcaaagctctgtctcaaaaaaagaaaaaaaaaatggttgctgcgtgatgaggcagttggtcaaattagttttcagaaggttaagggttctaaatatctagagtaaagaaactgaattaattatctgagcggcctcattgtgaatcactgtacactcaggaaccagactgagttgaaatcctgtctttgccacctattgacagcacgatcttaagtggattttagcctctgcctgtttctcagctgaatgtgagtttaataatagtgcatgccccaaagttgttggttaggaatcaatacatgaaaaacatttaagaatggtgccgggcacagtggtaactgacatatgagcacctgcctctctctgctcagatacagaaggtggtcatggcactaggagactacatgggcgcctcctgtcacgcctgtatcgggggcaccaacgtgcgtgctgaggtgcagaaactgcagatggaagctccccacatcatcgtgggtacccctggccgtgtgtttgatatgcttaaccggagatacctgtgtgagtaattcggttctccaatcccctgggtcactttgctcttgtgcacgctttccagtctttcagcgtaagccagagtcattcccaaggatgctggtttctctctgggggaagagctgctctgtgatggagcccatgcgtgtcatctgagcctctggcttccctgccagtgcagccctggcagtgtcctacttcccagggctgttgtctgcctggcgggaaggtcctgggcaaaggatcagtctttgtactctgagagcagactacttggctcctctctgttttttatcagcgaagttggatatatctctcccacatttccctaatcatatgctatatattggctttttttttcttctctagcccccaaatacatcaagatgtttgtactggatgaagctgacgaaatgttaagccgtggattcaaggaccagatctatgacatattccaaaagctcaacagcaacacccaggtgagggcagtcttgcttgaatagctaatgattcttgaaaaatagtaagtgccaggggaaccatatactggattcttgagcctttttatgcatctgcttcagttttaggtgtggctagggaagggagcaggcctcaggaaggaaccagcactctaagactggcctttttttccactaggtagttttgctgtcagccacaatgccttctgatgtgcttgaggtgaccaagaagttcatgagggaccccattcggattcttgtcaagaaggaagagttgaccctggagggtatccgccagttctacatcaacgtggaacgagaggtggggcccagtgcaggaggcgggcctggtagtgagttgttgggtatagcccctgactgatttttgtcccccaacctccaggagtggaagctggacacactatgtgacttgtatgaaaccctgaccatcacccaggcagtcatcttcatcaacacccggaggaaggtggactggctcaccgagaagatgcatgctcgagatttcactgtatccgccatggtgtgtttgcccgctgccagcctgttgtgggtctgcccgtcagaagtgtcctacttgaagccagggttcctggaacccaggtgcctacctggtctgctgcatatttgttttctcttccagcatggagatatggaccaaaaggaacgagacgtgattatgagggagtttcgttctggctctagcagagttttgattaccactgacctgctggtgagtagagggaactgatagcaaaggcagaagggaggatccaaggtgattccctctccaaggggacatcagtgcctctcaggaaagtagcagcttggaatagaatctggcatgcctaaggcctttggggaactgggatgcttatttcctctgccttccttggctgcccacatggatgcctaagtgtcttccctccgggatagagtgtcctccgtgcacatgctgaagagttgtctttcttgacgtaggccagaggcattgatgtgcagcaggtttctttagtcatcaactatgaccttcccaccaacagggaaaactatatccacaggtaagcgtagatctggaacactcccctaccccttcacacctggccctccctgggcttaaagctcctgatattcctcatccccttccttgttttccagaatcggtcgaggtggacggtttggccgtaaaggtgtggctattaacatggtgacagaagaagacaagaggactcttcgagacattgagaccttctacaacacctccattgaggaaatgcccctcaatgttgctgacctcatctgaggggctgtcctgccacccagccccagccagggctcaatctctgggggctgaggagcagcaggaggggggagggaagggagccaagggatggacatcttgtcattttttttctttgaataaatgtcactttttgaggcaaaagaaggaaccgtgaacattttagacacccttttctttggggtaggctcttgccccaggcgccggctcttctcccaaaaaaaaaaaaaaaacactaatccatttccctaacctagtaacctccagatcccagaggctctcctcacctcagctgagctcctttgaaagtgattcaagggactatgtcactcagcctcatttgctggaccaaatctggagggagaacccctaaaacccctaagtgaggttgcccagggggttgtccccaggtggggggaagcaggggagagaaaatggtagccatttttacattgttttgtatagtatttattgattcaggaaacaaacacaaaattctgaataaaatgacttggaaactgcctgtttgggcttctcatttcttacctccccttccctctcccacctgctactgggtgcatctctgctccccccttccccagcagatggttacctttgggctgttgctttcttgtcaccatctgagttctcagacgctggaaagccatgttctcggctctgtgaatgacaatgctgactggagtgctgcccctctgtaaagggctgggtgtggatggtcacaagcccctcacatgcctcagccaagaggaagtagtacaggggtcagcccagaggtccaggggaaaggagtggaaaccgatttccccaccaagggaggggcctgtacctcagctgttcccatagctacttgccacaactgccaagcaagtttcgctgagtttgacacatggatccctgtggatcaactgccctaggactccgtttgcacccatgtgacactgttgactttgccctgatgaagcagggccaacagtcccctaacttaattacaaaaactaatgactaagagagaggtggctagagctgaggcccctgagtcaggctgtgggtgggatcatctccagtacaggaagtgagactttcatttcctcctttccaagagagggctgagggagcagggttgagcaactggtgcagacagcctagctggactttgggtgaggcggttcagccatg

SEQ ID NO: 11986 - DNA, 2668 bp, Homo sapiens
tctctgcagccccctagtggccattgggtgcagcagacgattcacagttaactgacaaattaactggagtcagtaatgcctttggtcaagaattgtatagagaaatagggaaaggctggagttttagtcttttttcatatttcaaataaaaattcctcttccagtaggtatgtcagaaaaatctgatgaaaatcaaacatatattgtaccaggaaagtattaactaccatagcattttcctccctcttttctttcttttccacccttcctccaccaagataggagcatattttcttctcgggtgagataattctttgccctgaaacttgtaaagtcagtgtatccagtgtgacttccagagagagggcagatgcctgtcaaattaagtgagttgccaaacatagagcaggaagaaagccattccgagaatcaatattcctttgttactgggtcttccacttgccaaggcattgccacaaagctggaaaggcccagctcctaggagaacagaggttccacctggccactatctcctgtggggtggtaggcaagttactgcggcccccaggagctcagtgagggaggttcaatgtgacactgtgctctgatcctgtgagaaaactcctgtgctacccgacaggccgtgagctccagagaggatcttgccttattcttagcttcaacagtcagcccaaggcctgacaaccagcctttaagaaggaatcaaggggatttgtgtgacccaaagatggtagttttgtctgaggatctagtgaaccacttgttataaaaacagctattatgagttctgtgttggcagctcaggagagacgaaaggaaagggagaggagaggtacagccattacaggtgagtaaaaaaggcctaaggttctgaaccctcattcccaagattgtgggcaaacaattaaatgctctgcaactcagtttctgcatctgtaaatctggaattaaaatgtttgccttacagagactaggggaggttacacatgttcagacaccattctgagaaaacagagcgactgacaggggtctgaaaggtatttgttgtagctgcagaacaactctgccagaccaagaccatccatccctctctgcccccctattcccaaattctcctgtgtggacggcaggactcctaagctcccaggaatgcattcaaataatagatgggtcagaaaatattctgtctcagggccttaatacaagctgttctcagatttgccagtgtcgcgctgccaccctctccccacttcctcctcccttcccactcccccctcccttcccctctcctccagttttattctggaacctgtttttccgaagtcggacccgtttaatctcttaaatgtataattagggagagtgcttgattgcaaaggcctcttccagttctcacatttgctccctttcacactgcagagaaatagggcagggaatctagaggaggggaagaacaagagactggagagggaacagagggagggtggggcgggctcactccttttctcaatgaatgccgaggcctctgcagatttgcataggagccgatcgagccacgccattggttggagggtgcgggtggggcggggcgaggccggactgcgtgggtcgggcagcagcgcggagttggcttgtgagccccgccccctccgggccccgccccctccctgcgcgcgctcgcgcggctcagccagctgcaagtggcgggcgcccaggcagatgcgatccagcggctctgggggcggcagcggtggtagcagctggtacctcccgccgcctctgttcggagggtcgcggggcaccgaggtgctttccggccgccctctggtcggccacccaaagccgcgggcgctgatgatgggtgaggagggggcggcaagatttcgggcgcccctgccctgaacgccctcagctgctgccgccggggccgctccagtgcctgcgaactctgaggagccgaggcgccggtgagagcaaggacgctgcaaacttgcgcagcgcgggggctgggattcacgcccagaagttcagcaggcagacagtccgaagccttcccgcagcggagagatagcttgagggtgcgcaagacggcagcctccgccctcggttcccgcccagaccgggcagaagagcttggaggagccaaaaggaacgcaaaaggcggccaggacagcgtgcagcagctgggagccgccgttctcagccttaaaagttgcagagattggaggctgccccgagaggggacagaccccagctccgactgcggggggcaggagaggacggtacccaactgccacctcccttcaaccatagtagttcctctgtaccgagcgcagcgagctacagacgggggcgcggcactcggcgcggagagcgggaggctcaaggtcccagccagtgagcccagtgtgcttgagtgtctctggactcgcccctgagcttccaggtctgtttcatttagactcctgctcgcctccgtgcagttgggggaaagcaagagacttgcgcgcacgcacagtcctctggagatcaggtggaaggagccgctgggtaccaaggactgttcagagcctcttcccatctcggggagagcgaagggtgaggctgggcccggagagcagtgtaaacggcctcctccggcgggatg

SEQ ID NO: 11987 - DNA, 20 bp, Artificial
  Synthetically generated peptide
ccacgctggattttcaaaac

SEQ ID NO: 11988 - DNA, 20 bp, Artificial
  Synthetically generated peptide
ccacgctggattttcaaaac

SEQ ID NO: 11989 - DNA, 25 bp, Artificial
  Synthetically generated peptide
cggtgacgtcacgcacccccgtgcg

SEQ ID NO: 11990 - DNA, 20 bp, Artificial
  Synthetically generated peptide
ggtgacgtcacgcacccccg

SEQ ID NO: 11991 - DNA, 20 bp, Artificial
  Synthetically generated peptide
gtgacgtcacgcacccccgt

SEQ ID NO: 11992 - DNA, 20 bp, Artificial
  Synthetically generated peptide
tgacgtcacgcacccccgtg

SEQ ID NO: 11993 - DNA, 20 bp, Artificial
  Synthetically generated peptide
gacgtcacgcacccccgtgc

SEQ ID NO: 11994 - DNA, 20 bp, Artificial
  Synthetically generated peptide
acgtcacgcacccccgtgcg

SEQ ID NO: 11995 - DNA, 20 bp, Artificial
  Synthetically generated peptide
cgtcacgcacccccgtgcgg

SEQ ID NO: 11996 - DNA, 20 bp, Artificial
  Synthetically generated peptide
gtcacgcacccccgtgcggc

SEQ ID NO: 11997 - DNA, 20 bp, Artificial
  Synthetically generated peptide
tcacgcacccccgtgcggcc

SEQ ID NO: 11998 - DNA, 20 bp, Artificial
  Synthetically generated peptide
cacgcacccccgtgcggccc

SEQ ID NO: 11999 - DNA, 20 bp, Artificial
  Synthetically generated peptide
acgcacccccgtgcggcccc

SEQ ID NO: 12000 - DNA, 20 bp, Artificial
  Synthetically generated peptide
cgcacccccgtgcggccccc

SEQ ID NO: 12001 - DNA, 20 bp, Artificial
  Synthetically generated peptide
gcacccccgtgcggcccccg

SEQ ID NO: 12002 - DNA, 20 bp, Artificial
  Synthetically generated peptide
cacccccgtgcggcccccgc

SEQ ID NO: 12003 - DNA, 20 bp, Artificial
  Synthetically generated peptide
acccccgtgcggcccccgcc

SEQ ID NO: 12004 - DNA, 20 bp, Artificial
  Synthetically generated peptide
cccccgtgcggcccccgcct

SEQ ID NO: 12005 - DNA, 20 bp, Artificial
  Synthetically generated peptide
ccccgtgcggcccccgcctg

SEQ ID NO: 12006 - DNA, 20 bp, Artificial
  Synthetically generated peptide
cccgtgcggcccccgcctgc

SEQ ID NO: 12007 - DNA, 20 bp, Artificial
  Synthetically generated peptide
ccgtgcggcccccgcctgcc

SEQ ID NO: 12008 - DNA, 20 bp, Artificial
  Synthetically generated peptide
cgtgcggcccccgcctgccc

SEQ ID NO: 12009 - DNA, 20 bp, Artificial
  Synthetically generated peptide
gtgcggcccccgcctgcccg

SEQ ID NO: 12010 - DNA, 20 bp, Artificial
  Synthetically generated peptide
tgcggcccccgcctgcccgc

SEQ ID NO: 12011 - DNA, 20 bp, Artificial
  Synthetically generated peptide
gcggcccccgcctgcccgcg

SEQ ID NO: 12012 - DNA, 20 bp, Artificial
  Synthetically generated peptide
cggcccccgcctgcccgcgc

SEQ ID NO: 12013 - DNA, 20 bp, Artificial
  Synthetically generated peptide
ggcccccgcctgcccgcgcg

SEQ ID NO: 12014 - DNA, 20 bp, Artificial
  Synthetically generated peptide
gcccccgcctgcccgcgcgc

SEQ ID NO: 12015 - DNA, 20 bp, Artificial
  Synthetically generated peptide
cccccgcctgcccgcgcgcg

SEQ ID NO: 12016 - DNA, 20 bp, Artificial
  Synthetically generated peptide
ccccgcctgcccgcgcgcgc

SEQ ID NO: 12017 - DNA, 20 bp, Artificial
  Synthetically generated peptide
cccgcctgcccgcgcgcgca

SEQ ID NO: 12018 - DNA, 20 bp, Artificial
  Synthetically generated peptide
ccgcctgcccgcgcgcgcac

SEQ ID NO: 12019 - DNA, 20 bp, Artificial
  Synthetically generated peptide
cgcctgcccgcgcgcgcaca

SEQ ID NO: 12020 - DNA, 20 bp, Artificial
  Synthetically generated peptide
gcctgcccgcgcgcgcacac

SEQ ID NO: 12021 - DNA, 20 bp, Artificial
  Synthetically generated peptide
cctgcccgcgcgcgcacact

SEQ ID NO: 12022 - DNA, 20 bp, Artificial
  Synthetically generated peptide
ctgcccgcgcgcgcacactc

SEQ ID NO: 12023 - DNA, 20 bp, Artificial
  Synthetically generated peptide
tgcccgcgcgcgcacactcg

SEQ ID NO: 12024 - DNA, 20 bp, Artificial
  Synthetically generated peptide
gcccgcgcgcgcacactcgg

SEQ ID NO: 12025 - DNA, 20 bp, Artificial
  Synthetically generated peptide
cccgcgcgcgcacactcggc

SEQ ID NO: 12026 - DNA, 20 bp, Artificial
  Synthetically generated peptide
ccgcgcgcgcacactcggcc

SEQ ID NO: 12027 - DNA, 20 bp, Artificial
  Synthetically generated peptide
cgcgcgcgcacactcggccc

SEQ ID NO: 12028 - DNA, 20 bp, Artificial
  Synthetically generated peptide
gcgcgcgcacactcggcccc

SEQ ID NO: 12029 - DNA, 20 bp, Artificial
  Synthetically generated peptide
cgcgcgcacactcggccccc

SEQ ID NO: 12030 - DNA, 20 bp, Artificial
  Synthetically generated peptide
gcgcgcacactcggcccccc

SEQ ID NO: 12031 - DNA, 20 bp, Artificial
  Synthetically generated peptide
cgcgcacactcggcccccca

SEQ ID NO: 12032 - DNA, 20 bp, Artificial
  Synthetically generated peptide
gcgcacactcggccccccac

SEQ ID NO: 12033 - DNA, 20 bp, Artificial
  Synthetically generated peptide
cgcacactcggccccccacg

SEQ ID NO: 12034 - DNA, 20 bp, Artificial
  Synthetically generated peptide
gcacactcggccccccacgg

SEQ ID NO: 12035 - DNA, 20 bp, Artificial
  Synthetically generated peptide
cacactcggccccccacggc

SEQ ID NO: 12036 - DNA, 20 bp, Artificial
  Synthetically generated peptide
acactcggccccccacggcc

SEQ ID NO: 12037 - DNA, 20 bp, Artificial
  Synthetically generated peptide
ccggtgacgtcacgcacccc

SEQ ID NO: 12038 - DNA, 20 bp, Artificial
  Synthetically generated peptide
gccggtgacgtcacgcaccc

SEQ ID NO: 12039 - DNA, 20 bp, Artificial
  Synthetically generated peptide
tgccggtgacgtcacgcacc

SEQ ID NO: 12040 - DNA, 20 bp, Artificial
  Synthetically generated peptide
atgccggtgacgtcacgcac

SEQ ID NO: 12041 - DNA, 20 bp, Artificial
  Synthetically generated peptide
aatgccggtgacgtcacgca

SEQ ID NO: 12042 - DNA, 20 bp, Artificial
  Synthetically generated peptide
caatgccggtgacgtcacgc

SEQ ID NO: 12043 - DNA, 20 bp, Artificial
  Synthetically generated peptide
ccaatgccggtgacgtcacg

SEQ ID NO: 12044 - DNA, 20 bp, Artificial
  Synthetically generated peptide
accaatgccggtgacgtcac

SEQ ID NO: 12045 - DNA, 20 bp, Artificial
  Synthetically generated peptide
aaccaatgccggtgacgtca

SEQ ID NO: 12046 - DNA, 20 bp, Artificial
  Synthetically generated peptide
taaccaatgccggtgacgtc

SEQ ID NO: 12047 - DNA, 20 bp, Artificial
  Synthetically generated peptide
gtaaccaatgccggtgacgt

SEQ ID NO: 12048 - DNA, 20 bp, Artificial
  Synthetically generated peptide
tgtaaccaatgccggtgacg

SEQ ID NO: 12049 - DNA, 20 bp, Artificial
  Synthetically generated peptide
gtgtaaccaatgccggtgac

SEQ ID NO: 12050 - DNA, 20 bp, Artificial
  Synthetically generated peptide
cgtgtaaccaatgccggtga

SEQ ID NO: 12051 - DNA, 20 bp, Artificial
  Synthetically generated peptide
tcgtgtaaccaatgccggtg

SEQ ID NO: 12052 - DNA, 20 bp, Artificial
  Synthetically generated peptide
gtcgtgtaaccaatgccggt

SEQ ID NO: 12053 - DNA, 20 bp, Artificial
  Synthetically generated peptide
cgtcgtgtaaccaatgccgg

SEQ ID NO: 12054 - DNA, 20 bp, Artificial
  Synthetically generated peptide
acgtcgtgtaaccaatgccg

SEQ ID NO: 12055 - DNA, 20 bp, Artificial
  Synthetically generated peptide
aacgtcgtgtaaccaatgcc

SEQ ID NO: 12056 - DNA, 20 bp, Artificial
  Synthetically generated peptide
gaacgtcgtgtaaccaatgc

SEQ ID NO: 12057 - DNA, 20 bp, Artificial
  Synthetically generated peptide
agaacgtcgtgtaaccaatg

SEQ ID NO: 12058 - DNA, 22 bp, Artificial
  Synthetically generated peptide
cggatacaattacccatattgt

SEQ ID NO: 12059 - DNA, 26 bp, Artificial
  Synthetically generated peptide
gactcagttgctaacaaccatgagcg

SEQ ID NO: 12060 - DNA, 22 bp, Artificial
  Synthetically generated peptide
cagttgctaacaaccatgagcg

SEQ ID NO: 12061 - DNA, 28 bp, Artificial
  Synthetically generated peptide
catgaaaatttcaccaagtataaattac

SEQ ID NO: 12062 - DNA, 23 bp, Artificial
  Synthetically generated peptide
caccaagtataaattacaggtct

SEQ ID NO: 12063 - DNA, 25 bp, Artificial
  Synthetically generated peptide
cgcaccagtttgtccacgtccagtg

SEQ ID NO: 12064 - DNA, 20 bp, Artificial
  Synthetically generated peptide
gcaccagtttgtccacgtcc

SEQ ID NO: 12065 - DNA, 20 bp, Artificial
  Synthetically generated peptide
caccagtttgtccacgtcca

SEQ ID NO: 12066 - DNA, 20 bp, Artificial
  Synthetically generated peptide
accagtttgtccacgtccag

SEQ ID NO: 12067 - DNA, 20 bp, Artificial
  Synthetically generated peptide
ccagtttgtccacgtccagt

SEQ ID NO: 12068 - DNA, 20 bp, Artificial
  Synthetically generated peptide
cagtttgtccacgtccagtg

SEQ ID NO: 12069 - DNA, 20 bp, Artificial
  Synthetically generated peptide
agtttgtccacgtccagtgt

SEQ ID NO: 12070 - DNA, 20 bp, Artificial
  Synthetically generated peptide
gtttgtccacgtccagtgtc

SEQ ID NO: 12071 - DNA, 20 bp, Artificial
  Synthetically generated peptide
tttgtccacgtccagtgtca

SEQ ID NO: 12072 - DNA, 20 bp, Artificial
  Synthetically generated peptide
ttgtccacgtccagtgtcaa

SEQ ID NO: 12073 - DNA, 20 bp, Artificial
  Synthetically generated peptide
tgtccacgtccagtgtcaac

SEQ ID NO: 12074 - DNA, 20 bp, Artificial
  Synthetically generated peptide
gtccacgtccagtgtcaact

SEQ ID NO: 12075 - DNA, 20 bp, Artificial
  Synthetically generated peptide
tccacgtccagtgtcaactg

SEQ ID NO: 12076 - DNA, 20 bp, Artificial
  Synthetically generated peptide
ccacgtccagtgtcaactga

SEQ ID NO: 12077 - DNA, 20 bp, Artificial
  Synthetically generated peptide
cacgtccagtgtcaactgag

SEQ ID NO: 12078 - DNA, 20 bp, Artificial
  Synthetically generated peptide
acgtccagtgtcaactgagc

SEQ ID NO: 12079 - DNA, 20 bp, Artificial
  Synthetically generated peptide
cgtccagtgtcaactgagca

SEQ ID NO: 12080 - DNA, 20 bp, Artificial
  Synthetically generated peptide
tcgcaccagtttgtccacgt

SEQ ID NO: 12081 - DNA, 20 bp, Artificial
  Synthetically generated peptide
atcgcaccagtttgtccacg

SEQ ID NO: 12082 - DNA, 20 bp, Artificial
  Synthetically generated peptide
gatcgcaccagtttgtccac

SEQ ID NO: 12083 - DNA, 20 bp, Artificial
  Synthetically generated peptide
ggatcgcaccagtttgtcca

SEQ ID NO: 12084 - DNA, 20 bp, Artificial
  Synthetically generated peptide
gggatcgcaccagtttgtcc

SEQ ID NO: 12085 - DNA, 20 bp, Artificial
  Synthetically generated peptide
tgggatcgcaccagtttgtc

SEQ ID NO: 12086 - DNA, 20 bp, Artificial
  Synthetically generated peptide
ttgggatcgcaccagtttgt

SEQ ID NO: 12087 - DNA, 20 bp, Artificial
  Synthetically generated peptide
cttgggatcgcaccagtttg

SEQ ID NO: 12088 - DNA, 20 bp, Artificial
  Synthetically generated peptide
ccttgggatcgcaccagttt

SEQ ID NO: 12089 - DNA, 20 bp, Artificial
  Synthetically generated peptide
gccttgggatcgcaccagtt

SEQ ID NO: 12090 - DNA, 20 bp, Artificial
  Synthetically generated peptide
ggccttgggatcgcaccagt

SEQ ID NO: 12091 - DNA, 20 bp, Artificial
  Synthetically generated peptide
gggccttgggatcgcaccag

SEQ ID NO: 12092 - DNA, 20 bp, Artificial
  Synthetically generated peptide
ggggccttgggatcgcacca

SEQ ID NO: 12093 - DNA, 20 bp, Artificial
  Synthetically generated peptide
gggggccttgggatcgcacc

SEQ ID NO: 12094 - DNA, 20 bp, Artificial
  Synthetically generated peptide
tgggggccttgggatcgcac

SEQ ID NO: 12095 - DNA, 20 bp, Artificial
  Synthetically generated peptide
ctgggggccttgggatcgca

SEQ ID NO: 12096 - DNA, 20 bp, Artificial
  Synthetically generated peptide
tctgggggccttgggatcgc

SEQ ID NO: 12097 - DNA, 20 bp, Artificial
  Synthetically generated peptide
atctgggggccttgggatcg

SEQ ID NO: 12098 - DNA, 27 bp, Artificial
  Synthetically generated peptide
gccgtcactgccgacataagcacagac

SEQ ID NO: 12099 - DNA, 20 bp, Artificial
  Synthetically generated peptide
ccgtcactgccgacataagc

SEQ ID NO: 12100 - DNA, 20 bp, Artificial
  Synthetically generated peptide
cgtcactgccgacataagca

SEQ ID NO: 12101 - DNA, 20 bp, Artificial
  Synthetically generated peptide
gtcactgccgacataagcac

SEQ ID NO: 12102 - DNA, 20 bp, Artificial
  Synthetically generated peptide
tcactgccgacataagcaca

SEQ ID NO: 12103 - DNA, 20 bp, Artificial
  Synthetically generated peptide
cactgccgacataagcacag

SEQ ID NO: 12104 - DNA, 20 bp, Artificial
  Synthetically generated peptide
actgccgacataagcacaga

SEQ ID NO: 12105 - DNA, 20 bp, Artificial
  Synthetically generated peptide
ctgccgacataagcacagac

SEQ ID NO: 12106 - DNA, 20 bp, Artificial
  Synthetically generated peptide
tgccgacataagcacagaca

SEQ ID NO: 12107 - DNA, 20 bp, Artificial
  Synthetically generated peptide
gccgacataagcacagacaa

SEQ ID NO: 12108 - DNA, 20 bp, Artificial
  Synthetically generated peptide
ccgacataagcacagacaac

SEQ ID NO: 12109 - DNA, 20 bp, Artificial
  Synthetically generated peptide
cgacataagcacagacaact

SEQ ID NO: 12110 - DNA, 20 bp, Artificial
  Synthetically generated peptide
cgccgtcactgccgacataa

SEQ ID NO: 12111 - DNA, 20 bp, Artificial
  Synthetically generated peptide
tcgccgtcactgccgacata

SEQ ID NO: 12112 - DNA, 20 bp, Artificial
  Synthetically generated peptide
atcgccgtcactgccgacat

SEQ ID NO: 12113 - DNA, 20 bp, Artificial
  Synthetically generated peptide
aatcgccgtcactgccgaca

SEQ ID NO: 12114 - DNA, 20 bp, Artificial
  Synthetically generated peptide
caatcgccgtcactgccgac

SEQ ID NO: 12115 - DNA, 20 bp, Artificial
  Synthetically generated peptide
ccaatcgccgtcactgccga

SEQ ID NO: 12116 - DNA, 20 bp, Artificial
  Synthetically generated peptide
gccaatcgccgtcactgccg

SEQ ID NO: 12117 - DNA, 20 bp, Artificial
  Synthetically generated peptide
agccaatcgccgtcactgcc

SEQ ID NO: 12118 - DNA, 20 bp, Artificial
  Synthetically generated peptide
cagccaatcgccgtcactgc

SEQ ID NO: 12119 - DNA, 20 bp, Artificial
  Synthetically generated peptide
ccagccaatcgccgtcactg

SEQ ID NO: 12120 - DNA, 20 bp, Artificial
  Synthetically generated peptide
cccagccaatcgccgtcact

SEQ ID NO: 12121 - DNA, 20 bp, Artificial
  Synthetically generated peptide
acccagccaatcgccgtcac

SEQ ID NO: 12122 - DNA, 20 bp, Artificial
  Synthetically generated peptide
tacccagccaatcgccgtca

SEQ ID NO: 12123 - DNA, 20 bp, Artificial
  Synthetically generated peptide
ctacccagccaatcgccgtc

SEQ ID NO: 12124 - DNA, 20 bp, Artificial
  Synthetically generated peptide
cctacccagccaatcgccgt

SEQ ID NO: 12125 - DNA, 20 bp, Artificial
  Synthetically generated peptide
gcctacccagccaatcgccg

SEQ ID NO: 12126 - DNA, 20 bp, Artificial
  Synthetically generated peptide
tgcctacccagccaatcgcc

SEQ ID NO: 12127 - DNA, 20 bp, Artificial
  Synthetically generated peptide
ttgcctacccagccaatcgc

SEQ ID NO: 12128 - DNA, 20 bp, Artificial
  Synthetically generated peptide
cttgcctacccagccaatcg

SEQ ID NO: 12129 - DNA, 25 bp, Artificial
  Synthetically generated peptide
cgctgctactgcgccgacagccctc

SEQ ID NO: 12130 - DNA, 20 bp, Artificial
  Synthetically generated peptide
gctgctactgcgccgacagc

SEQ ID NO: 12131 - DNA, 20 bp, Artificial
  Synthetically generated peptide
ctgctactgcgccgacagcc

SEQ ID NO: 12132 - DNA, 20 bp, Artificial
  Synthetically generated peptide
tgctactgcgccgacagccc

SEQ ID NO: 12133 - DNA, 20 bp, Artificial
  Synthetically generated peptide
gctactgcgccgacagccct

SEQ ID NO: 12134 - DNA, 20 bp, Artificial
  Synthetically generated peptide
ctactgcgccgacagccctc

SEQ ID NO: 12135 - DNA, 20 bp, Artificial
  Synthetically generated peptide
tactgcgccgacagccctct

SEQ ID NO: 12136 - DNA, 20 bp, Artificial
  Synthetically generated peptide
actgcgccgacagccctctg

SEQ ID NO: 12137 - DNA, 20 bp, Artificial
  Synthetically generated peptide
ctgcgccgacagccctctgg

SEQ ID NO: 12138 - DNA, 20 bp, Artificial
  Synthetically generated peptide
tgcgccgacagccctctgga

SEQ ID NO: 12139 - DNA, 20 bp, Artificial
  Synthetically generated peptide
gcgccgacagccctctggag

SEQ ID NO: 12140 - DNA, 20 bp, Artificial
  Synthetically generated peptide
cgccgacagccctctggagg

SEQ ID NO: 12141 - DNA, 20 bp, Artificial
  Synthetically generated peptide
gccgacagccctctggaggc

SEQ ID NO: 12142 - DNA, 20 bp, Artificial
  Synthetically generated peptide
ccgacagccctctggaggct

SEQ ID NO: 12143 - DNA, 20 bp, Artificial
  Synthetically generated peptide
cgacagccctctggaggctc

SEQ ID NO: 12144 - DNA, 20 bp, Artificial
  Synthetically generated peptide
tcgctgctactgcgccgaca

SEQ ID NO: 12145 - DNA, 20 bp, Artificial
  Synthetically generated peptide
ctcgctgctactgcgccgac

SEQ ID NO: 12146 - DNA, 20 bp, Artificial
  Synthetically generated peptide
gctcgctgctactgcgccga

SEQ ID NO: 12147 - DNA, 20 bp, Artificial
  Synthetically generated peptide
tgctcgctgctactgcgccg

SEQ ID NO: 12148 - DNA, 20 bp, Artificial
  Synthetically generated peptide
ctgctcgctgctactgcgcc

SEQ ID NO: 12149 - DNA, 20 bp, Artificial
  Synthetically generated peptide
gctgctcgctgctactgcgc

SEQ ID NO: 12150 - DNA, 20 bp, Artificial
  Synthetically generated peptide
tgctgctcgctgctactgcg

SEQ ID NO: 12151 - DNA, 20 bp, Artificial
  Synthetically generated peptide
ctgctgctcgctgctactgc

SEQ ID NO: 12152 - DNA, 20 bp, Artificial
  Synthetically generated peptide
tctgctgctcgctgctactg

SEQ ID NO: 12153 - DNA, 20 bp, Artificial
  Synthetically generated peptide
ctctgctgctcgctgctact

SEQ ID NO: 12154 - DNA, 20 bp, Artificial
  Synthetically generated peptide
actctgctgctcgctgctac

SEQ ID NO: 12155 - DNA, 20 bp, Artificial
  Synthetically generated peptide
gactctgctgctcgctgcta

SEQ ID NO: 12156 - DNA, 20 bp, Artificial
  Synthetically generated peptide
ggactctgctgctcgctgct

SEQ ID NO: 12157 - DNA, 20 bp, Artificial
  Synthetically generated peptide
cggactctgctgctcgctgc

SEQ ID NO: 12158 - DNA, 20 bp, Artificial
  Synthetically generated peptide
gcggactctgctgctcgctg

SEQ ID NO: 12159 - DNA, 20 bp, Artificial
  Synthetically generated peptide
tgcggactctgctgctcgct

SEQ ID NO: 12160 - DNA, 20 bp, Artificial
  Synthetically generated peptide
gtgcggactctgctgctcgc

SEQ ID NO: 12161 - DNA, 20 bp, Artificial
  Synthetically generated peptide
cgtgcggactctgctgctcg

SEQ ID NO: 12162 - DNA, 20 bp, Artificial
  Synthetically generated peptide
gcgtgcggactctgctgctc

SEQ ID NO: 12163 - DNA, 20 bp, Artificial
  Synthetically generated peptide
agcgtgcggactctgctgct

SEQ ID NO: 12164 - DNA, 20 bp, Artificial
  Synthetically generated peptide
gagcgtgcggactctgctgc

SEQ ID NO: 12165 - DNA, 20 bp, Artificial
  Synthetically generated peptide
ggagcgtgcggactctgctg

SEQ ID NO: 12166 - DNA, 20 bp, Artificial
  Synthetically generated peptide
cggagcgtgcggactctgct

SEQ ID NO: 12167 - DNA, 20 bp, Artificial
  Synthetically generated peptide
ccggagcgtgcggactctgc

SEQ ID NO: 12168 - DNA, 20 bp, Artificial
  Synthetically generated peptide
gccggagcgtgcggactctg

SEQ ID NO: 12169 - DNA, 20 bp, Artificial
  Synthetically generated peptide
cgccggagcgtgcggactct

SEQ ID NO: 12170 - DNA, 20 bp, Artificial
  Synthetically generated peptide
tcgccggagcgtgcggactc

SEQ ID NO: 12171 - DNA, 20 bp, Artificial
  Synthetically generated peptide
ctcgccggagcgtgcggact

SEQ ID NO: 12172 - DNA, 20 bp, Artificial
  Synthetically generated peptide
cctcgccggagcgtgcggac

SEQ ID NO: 12173 - DNA, 20 bp, Artificial
  Synthetically generated peptide
ccctcgccggagcgtgcgga

SEQ ID NO: 12174 - DNA, 20 bp, Artificial
  Synthetically generated peptide
cccctcgccggagcgtgcgg

SEQ ID NO: 12175 - DNA, 20 bp, Artificial
  Synthetically generated peptide
gcccctcgccggagcgtgcg

SEQ ID NO: 12176 - DNA, 20 bp, Artificial
  Synthetically generated peptide
tgcccctcgccggagcgtgc

SEQ ID NO: 12177 - DNA, 20 bp, Artificial
  Synthetically generated peptide
ctgcccctcgccggagcgtg

SEQ ID NO: 12178 - DNA, 20 bp, Artificial
  Synthetically generated peptide
tctgcccctcgccggagcgt

SEQ ID NO: 12179 - DNA, 20 bp, Artificial
  Synthetically generated peptide
ttctgcccctcgccggagcg

SEQ ID NO: 12180 - DNA, 20 bp, Artificial
  Synthetically generated peptide
cttctgcccctcgccggagc

SEQ ID NO: 12181 - DNA, 20 bp, Artificial
  Synthetically generated peptide
tcttctgcccctcgccggag

SEQ ID NO: 12182 - DNA, 20 bp, Artificial
  Synthetically generated peptide
ctcttctgcccctcgccgga

SEQ ID NO: 12183 - DNA, 20 bp, Artificial
  Synthetically generated peptide
gctcttctgcccctcgccgg

SEQ ID NO: 12184 - DNA, 20 bp, Artificial
  Synthetically generated peptide
cgctcttctgcccctcgccg

SEQ ID NO: 12185 - DNA, 20 bp, Artificial
  Synthetically generated peptide
gcgctcttctgcccctcgcc

SEQ ID NO: 12186 - DNA, 20 bp, Artificial
  Synthetically generated peptide
cgcgctcttctgcccctcgc

SEQ ID NO: 12187 - DNA, 20 bp, Artificial
  Synthetically generated peptide
tcgcgctcttctgcccctcg

SEQ ID NO: 12188 - DNA, 20 bp, Artificial
  Synthetically generated peptide
ctcgcgctcttctgcccctc

SEQ ID NO: 12189 - DNA, 20 bp, Artificial
  Synthetically generated peptide
cctcgcgctcttctgcccct

SEQ ID NO: 12190 - DNA, 20 bp, Artificial
  Synthetically generated peptide
ccctcgcgctcttctgcccc

SEQ ID NO: 12191 - DNA, 20 bp, Artificial
  Synthetically generated peptide
tccctcgcgctcttctgccc

SEQ ID NO: 12192 - DNA, 20 bp, Artificial
  Synthetically generated peptide
ctccctcgcgctcttctgcc

SEQ ID NO: 12193 - DNA, 20 bp, Artificial
  Synthetically generated peptide
gctccctcgcgctcttctgc

SEQ ID NO: 12194 - DNA, 20 bp, Artificial
  Synthetically generated peptide
cgctccctcgcgctcttctg

SEQ ID NO: 12195 - DNA, 20 bp, Artificial
  Synthetically generated peptide
gcgctccctcgcgctcttct

SEQ ID NO: 12196 - DNA, 20 bp, Artificial
  Synthetically generated peptide
cgcgctccctcgcgctcttc

SEQ ID NO: 12197 - DNA, 20 bp, Artificial
  Synthetically generated peptide
ccgcgctccctcgcgctctt

SEQ ID NO: 12198 - DNA, 20 bp, Artificial
  Synthetically generated peptide
cccgcgctccctcgcgctct

SEQ ID NO: 12199 - DNA, 20 bp, Artificial
  Synthetically generated peptide
ccccgcgctccctcgcgctc

SEQ ID NO: 12200 - DNA, 20 bp, Artificial
  Synthetically generated peptide
gccccgcgctccctcgcgct

SEQ ID NO: 12201 - DNA, 20 bp, Artificial
  Synthetically generated peptide
tgccccgcgctccctcgcgc

SEQ ID NO: 12202 - DNA, 20 bp, Artificial
  Synthetically generated peptide
ctgccccgcgctccctcgcg

SEQ ID NO: 12203 - DNA, 20 bp, Artificial
  Synthetically generated peptide
gctgccccgcgctccctcgc

SEQ ID NO: 12204 - DNA, 20 bp, Artificial
  Synthetically generated peptide
tgctgccccgcgctccctcg

SEQ ID NO: 12205 - DNA, 20 bp, Artificial
  Synthetically generated peptide
ctgctgccccgcgctccctc

SEQ ID NO: 12206 - DNA, 20 bp, Artificial
  Synthetically generated peptide
tctgctgccccgcgctccct

SEQ ID NO: 12207 - DNA, 20 bp, Artificial
  Synthetically generated peptide
ttctgctgccccgcgctccc

SEQ ID NO: 12208 - DNA, 20 bp, Artificial
  Synthetically generated peptide
cttctgctgccccgcgctcc

SEQ ID NO: 12209 - DNA, 20 bp, Artificial
  Synthetically generated peptide
gcttctgctgccccgcgctc

SEQ ID NO: 12210 - DNA, 20 bp, Artificial
  Synthetically generated peptide
cgcttctgctgccccgcgct

SEQ ID NO: 12211 - DNA, 20 bp, Artificial
  Synthetically generated peptide
tcgcttctgctgccccgcgc

SEQ ID NO: 12212 - DNA, 20 bp, Artificial
  Synthetically generated peptide
ctcgcttctgctgccccgcg

SEQ ID NO: 12213 - DNA, 20 bp, Artificial
  Synthetically generated peptide
tctcgcttctgctgccccgc

SEQ ID NO: 12214 - DNA, 20 bp, Artificial
  Synthetically generated peptide
ctctcgcttctgctgccccg

SEQ ID NO: 12215 - DNA, 20 bp, Artificial
  Synthetically generated peptide
gctctcgcttctgctgcccc

SEQ ID NO: 12216 - DNA, 20 bp, Artificial
  Synthetically generated peptide
ggctctcgcttctgctgccc

SEQ ID NO: 12217 - DNA, 20 bp, Artificial
  Synthetically generated peptide
cggctctcgcttctgctgcc

SEQ ID NO: 12218 - DNA, 20 bp, Artificial
  Synthetically generated peptide
tcggctctcgcttctgctgc

SEQ ID NO: 12219 - DNA, 20 bp, Artificial
  Synthetically generated peptide
ctcggctctcgcttctgctg

SEQ ID NO: 12220 - DNA, 20 bp, Artificial
  Synthetically generated peptide
gctcggctctcgcttctgct

SEQ ID NO: 12221 - DNA, 20 bp, Artificial
  Synthetically generated peptide
cgctcggctctcgcttctgc

SEQ ID NO: 12222 - DNA, 20 bp, Artificial
  Synthetically generated peptide
gcgctcggctctcgcttctg

SEQ ID NO: 12223 - DNA, 20 bp, Artificial
  Synthetically generated peptide
cgcgctcggctctcgcttct

SEQ ID NO: 12224 - DNA, 20 bp, Artificial
  Synthetically generated peptide
ccgcgctcggctctcgcttc

SEQ ID NO: 12225 - DNA, 20 bp, Artificial
  Synthetically generated peptide
tccgcgctcggctctcgctt

SEQ ID NO: 12226 - DNA, 20 bp, Artificial
  Synthetically generated peptide
gtccgcgctcggctctcgct

SEQ ID NO: 12227 - DNA, 20 bp, Artificial
  Synthetically generated peptide
ggtccgcgctcggctctcgc

SEQ ID NO: 12228 - DNA, 20 bp, Artificial
  Synthetically generated peptide
gggtccgcgctcggctctcg

SEQ ID NO: 12229 - DNA, 20 bp, Artificial
  Synthetically generated peptide
tgggtccgcgctcggctctc

SEQ ID NO: 12230 - DNA, 20 bp, Artificial
  Synthetically generated peptide
ctgggtccgcgctcggctct

SEQ ID NO: 12231 - DNA, 20 bp, Artificial
  Synthetically generated peptide
gctgggtccgcgctcggctc

SEQ ID NO: 12232 - DNA, 20 bp, Artificial
  Synthetically generated peptide
ggctgggtccgcgctcggct

SEQ ID NO: 12233 - DNA, 20 bp, Artificial
  Synthetically generated peptide
tggctgggtccgcgctcggc

SEQ ID NO: 12234 - DNA, 20 bp, Artificial
  Synthetically generated peptide
ctggctgggtccgcgctcgg

SEQ ID NO: 12235 - DNA, 20 bp, Artificial
  Synthetically generated peptide
cctggctgggtccgcgctcg

SEQ ID NO: 12236 - DNA, 20 bp, Artificial
  Synthetically generated peptide
tcctggctgggtccgcgctc

SEQ ID NO: 12237 - DNA, 20 bp, Artificial
  Synthetically generated peptide
gtcctggctgggtccgcgct

SEQ ID NO: 12238 - DNA, 20 bp, Artificial
  Synthetically generated peptide
ggtcctggctgggtccgcgc

SEQ ID NO: 12239 - DNA, 20 bp, Artificial
  Synthetically generated peptide
gggtcctggctgggtccgcg

SEQ ID NO: 12240 - DNA, 20 bp, Artificial
  Synthetically generated peptide
tgggtcctggctgggtccgc

SEQ ID NO: 12241 - DNA, 20 bp, Artificial
  Synthetically generated peptide
gtgggtcctggctgggtccg

SEQ ID NO: 12242 - DNA, 25 bp, Artificial
  Synthetically generated peptide
cggcagaatgggcgcatttccaaga

SEQ ID NO: 12243 - DNA, 20 bp, Artificial
  Synthetically generated peptide
ggcagaatgggcgcatttcc

SEQ ID NO: 12244 - DNA, 20 bp, Artificial
  Synthetically generated peptide
gcagaatgggcgcatttcca

SEQ ID NO: 12245 - DNA, 20 bp, Artificial
  Synthetically generated peptide
cagaatgggcgcatttccaa

SEQ ID NO: 12246 - DNA, 20 bp, Artificial
  Synthetically generated peptide
agaatgggcgcatttccaag

SEQ ID NO: 12247 - DNA, 20 bp, Artificial
  Synthetically generated peptide
gaatgggcgcatttccaaga

SEQ ID NO: 12248 - DNA, 20 bp, Artificial
  Synthetically generated peptide
aatgggcgcatttccaagaa

SEQ ID NO: 12249 - DNA, 20 bp, Artificial
  Synthetically generated peptide
atgggcgcatttccaagaac

SEQ ID NO: 12250 - DNA, 20 bp, Artificial
  Synthetically generated peptide
tgggcgcatttccaagaacg

SEQ ID NO: 12251 - DNA, 20 bp, Artificial
  Synthetically generated peptide
gggcgcatttccaagaacgc

SEQ ID NO: 12252 - DNA, 20 bp, Artificial
  Synthetically generated peptide
ggcgcatttccaagaacgcc

SEQ ID NO: 12253 - DNA, 20 bp, Artificial
  Synthetically generated peptide
gcgcatttccaagaacgcca

SEQ ID NO: 12254 - DNA, 20 bp, Artificial
  Synthetically generated peptide
cgcatttccaagaacgccac

SEQ ID NO: 12255 - DNA, 20 bp, Artificial
  Synthetically generated peptide
gcatttccaagaacgccacg

SEQ ID NO: 12256 - DNA, 20 bp, Artificial
  Synthetically generated peptide
catttccaagaacgccacga

SEQ ID NO: 12257 - DNA, 20 bp, Artificial
  Synthetically generated peptide
atttccaagaacgccacgag

SEQ ID NO: 12258 - DNA, 20 bp, Artificial
  Synthetically generated peptide
tttccaagaacgccacgagg

SEQ ID NO: 12259 - DNA, 20 bp, Artificial
  Synthetically generated peptide
ttccaagaacgccacgaggg

SEQ ID NO: 12260 - DNA, 20 bp, Artificial
  Synthetically generated peptide
tccaagaacgccacgagggc

SEQ ID NO: 12261 - DNA, 20 bp, Artificial
  Synthetically generated peptide
ccaagaacgccacgagggca

SEQ ID NO: 12262 - DNA, 20 bp, Artificial
  Synthetically generated peptide
caagaacgccacgagggcac

SEQ ID NO: 12263 - DNA, 20 bp, Artificial
  Synthetically generated peptide
aagaacgccacgagggcacc

SEQ ID NO: 12264 - DNA, 20 bp, Artificial
  Synthetically generated peptide
agaacgccacgagggcaccc

SEQ ID NO: 12265 - DNA, 20 bp, Artificial
  Synthetically generated peptide
gaacgccacgagggcaccca

SEQ ID NO: 12266 - DNA, 20 bp, Artificial
  Synthetically generated peptide
aacgccacgagggcacccac

SEQ ID NO: 12267 - DNA, 20 bp, Artificial
  Synthetically generated peptide
acgccacgagggcacccacg

SEQ ID NO: 12268 - DNA, 20 bp, Artificial
  Synthetically generated peptide
cgccacgagggcacccacgg

SEQ ID NO: 12269 - DNA, 20 bp, Artificial
  Synthetically generated peptide
gccacgagggcacccacggg

SEQ ID NO: 12270 - DNA, 20 bp, Artificial
  Synthetically generated peptide
ccacgagggcacccacgggc

SEQ ID NO: 12271 - DNA, 20 bp, Artificial
  Synthetically generated peptide
cacgagggcacccacgggcg

SEQ ID NO: 12272 - DNA, 20 bp, Artificial
  Synthetically generated peptide
acgagggcacccacgggcgg

SEQ ID NO: 12273 - DNA, 20 bp, Artificial
  Synthetically generated peptide
cgagggcacccacgggcgga

SEQ ID NO: 12274 - DNA, 20 bp, Artificial
  Synthetically generated peptide
gagggcacccacgggcggac

SEQ ID NO: 12275 - DNA, 20 bp, Artificial
  Synthetically generated peptide
agggcacccacgggcggaca

SEQ ID NO: 12276 - DNA, 20 bp, Artificial
  Synthetically generated peptide
gggcacccacgggcggacag

SEQ ID NO: 12277 - DNA, 20 bp, Artificial
  Synthetically generated peptide
ggcacccacgggcggacaga

SEQ ID NO: 12278 - DNA, 20 bp, Artificial
  Synthetically generated peptide
gcacccacgggcggacagac

SEQ ID NO: 12279 - DNA, 20 bp, Artificial
  Synthetically generated peptide
cacccacgggcggacagacg

SEQ ID NO: 12280 - DNA, 20 bp, Artificial
  Synthetically generated peptide
acccacgggcggacagacgg

SEQ ID NO: 12281 - DNA, 20 bp, Artificial
  Synthetically generated peptide
cccacgggcggacagacggc

SEQ ID NO: 12282 - DNA, 20 bp, Artificial
  Synthetically generated peptide
ccacgggcggacagacggcc

SEQ ID NO: 12283 - DNA, 20 bp, Artificial
  Synthetically generated peptide
cacgggcggacagacggcca

SEQ ID NO: 12284 - DNA, 20 bp, Artificial
  Synthetically generated peptide
ccggcagaatgggcgcattt

SEQ ID NO: 12285 - DNA, 20 bp, Artificial
  Synthetically generated peptide
gccggcagaatgggcgcatt

SEQ ID NO: 12286 - DNA, 20 bp, Artificial
  Synthetically generated peptide
agccggcagaatgggcgcat

SEQ ID NO: 12287 - DNA, 26 bp, Artificial
  Synthetically generated peptide
acgccacgagggcacccacgggcgga

SEQ ID NO: 12288 - DNA, 20 bp, Artificial
  Synthetically generated peptide
cgccacgagggcacccacgg

SEQ ID NO: 12289 - DNA, 20 bp, Artificial
  Synthetically generated peptide
gccacgagggcacccacggg

SEQ ID NO: 12290 - DNA, 20 bp, Artificial
  Synthetically generated peptide
ccacgagggcacccacgggc

SEQ ID NO: 12291 - DNA, 20 bp, Artificial
  Synthetically generated peptide
cacgagggcacccacgggcg

SEQ ID NO: 12292 - DNA, 20 bp, Artificial
  Synthetically generated peptide
acgagggcacccacgggcgg

SEQ ID NO: 12293 - DNA, 20 bp, Artificial
  Synthetically generated peptide
cgagggcacccacgggcgga

SEQ ID NO: 12294 - DNA, 20 bp, Artificial
  Synthetically generated peptide
gagggcacccacgggcggac

SEQ ID NO: 12295 - DNA, 20 bp, Artificial
  Synthetically generated peptide
agggcacccacgggcggaca

SEQ ID NO: 12296 - DNA, 20 bp, Artificial
  Synthetically generated peptide
gggcacccacgggcggacag

SEQ ID NO: 12297 - DNA, 20 bp, Artificial
  Synthetically generated peptide
ggcacccacgggcggacaga

SEQ ID NO: 12298 - DNA, 20 bp, Artificial
  Synthetically generated peptide
gcacccacgggcggacagac

SEQ ID NO: 12299 - DNA, 20 bp, Artificial
  Synthetically generated peptide
cacccacgggcggacagacg

SEQ ID NO: 12300 - DNA, 20 bp, Artificial
  Synthetically generated peptide
acccacgggcggacagacgg

SEQ ID NO: 12301 - DNA, 20 bp, Artificial
  Synthetically generated peptide
cccacgggcggacagacggc

SEQ ID NO: 12302 - DNA, 20 bp, Artificial
  Synthetically generated peptide
ccacgggcggacagacggcc

SEQ ID NO: 12303 - DNA, 20 bp, Artificial
  Synthetically generated peptide
cacgggcggacagacggcca

SEQ ID NO: 12304 - DNA, 20 bp, Artificial
  Synthetically generated peptide
aacgccacgagggcacccac

SEQ ID NO: 12305 - DNA, 20 bp, Artificial
  Synthetically generated peptide
gaacgccacgagggcaccca

SEQ ID NO: 12306 - DNA, 20 bp, Artificial
  Synthetically generated peptide
agaacgccacgagggcaccc

SEQ ID NO: 12307 - DNA, 20 bp, Artificial
  Synthetically generated peptide
aagaacgccacgagggcacc

SEQ ID NO: 12308 - DNA, 20 bp, Artificial
  Synthetically generated peptide
caagaacgccacgagggcac

SEQ ID NO: 12309 - DNA, 20 bp, Artificial
  Synthetically generated peptide
ccaagaacgccacgagggca

SEQ ID NO: 12310 - DNA, 20 bp, Artificial
  Synthetically generated peptide
tccaagaacgccacgagggc

SEQ ID NO: 12311 - DNA, 20 bp, Artificial
  Synthetically generated peptide
ttccaagaacgccacgaggg

SEQ ID NO: 12312 - DNA, 20 bp, Artificial
  Synthetically generated peptide
tttccaagaacgccacgagg

SEQ ID NO: 12313 - DNA, 20 bp, Artificial
  Synthetically generated peptide
atttccaagaacgccacgag

SEQ ID NO: 12314 - DNA, 20 bp, Artificial
  Synthetically generated peptide
catttccaagaacgccacga

SEQ ID NO: 12315 - DNA, 20 bp, Artificial
  Synthetically generated peptide
gcatttccaagaacgccacg

SEQ ID NO: 12316 - DNA, 20 bp, Artificial
  Synthetically generated peptide
cgcatttccaagaacgccac

SEQ ID NO: 12317 - DNA, 20 bp, Artificial
  Synthetically generated peptide
gcgcatttccaagaacgcca

SEQ ID NO: 12318 - DNA, 20 bp, Artificial
  Synthetically generated peptide
ggcgcatttccaagaacgcc

SEQ ID NO: 12319 - DNA, 20 bp, Artificial
  Synthetically generated peptide
gggcgcatttccaagaacgc

SEQ ID NO: 12320 - DNA, 20 bp, Artificial
  Synthetically generated peptide
tgggcgcatttccaagaacg

SEQ ID NO: 12321 - DNA, 20 bp, Artificial
  Synthetically generated peptide
atgggcgcatttccaagaac

SEQ ID NO: 12322 - DNA, 20 bp, Artificial
  Synthetically generated peptide
aatgggcgcatttccaagaa

SEQ ID NO: 12323 - DNA, 20 bp, Artificial
  Synthetically generated peptide
gaatgggcgcatttccaaga

SEQ ID NO: 12324 - DNA, 20 bp, Artificial
  Synthetically generated peptide
agaatgggcgcatttccaag

SEQ ID NO: 12325 - DNA, 20 bp, Artificial
  Synthetically generated peptide
cagaatgggcgcatttccaa

SEQ ID NO: 12326 - DNA, 20 bp, Artificial
  Synthetically generated peptide
gcagaatgggcgcatttcca

SEQ ID NO: 12327 - DNA, 20 bp, Artificial
  Synthetically generated peptide
ggcagaatgggcgcatttcc

SEQ ID NO: 12328 - DNA, 20 bp, Artificial
  Synthetically generated peptide
cggcagaatgggcgcatttc

SEQ ID NO: 12329 - DNA, 20 bp, Artificial
  Synthetically generated peptide
ccggcagaatgggcgcattt

SEQ ID NO: 12330 - DNA, 20 bp, Artificial
  Synthetically generated peptide
gccggcagaatgggcgcatt

SEQ ID NO: 12331 - DNA, 20 bp, Artificial
  Synthetically generated peptide
agccggcagaatgggcgcat

SEQ ID NO: 12332 - DNA, 25 bp, Artificial
  Synthetically generated peptide
cggtgaccgcggcctgggcggatgg

SEQ ID NO: 12333 - DNA, 20 bp, Artificial
  Synthetically generated peptide
ggtgaccgcggcctgggcgg

SEQ ID NO: 12334 - DNA, 20 bp, Artificial
  Synthetically generated peptide
gtgaccgcggcctgggcgga

SEQ ID NO: 12335 - DNA, 20 bp, Artificial
  Synthetically generated peptide
tgaccgcggcctgggcggat

SEQ ID NO: 12336 - DNA, 20 bp, Artificial
  Synthetically generated peptide
gaccgcggcctgggcggatg

SEQ ID NO: 12337 - DNA, 20 bp, Artificial
  Synthetically generated peptide
accgcggcctgggcggatgg

SEQ ID NO: 12338 - DNA, 20 bp, Artificial
  Synthetically generated peptide
ccgcggcctgggcggatggt

SEQ ID NO: 12339 - DNA, 20 bp, Artificial
  Synthetically generated peptide
cgcggcctgggcggatggtc

SEQ ID NO: 12340 - DNA, 20 bp, Artificial
  Synthetically generated peptide
gcggcctgggcggatggtcg

SEQ ID NO: 12341 - DNA, 20 bp, Artificial
  Synthetically generated peptide
cggcctgggcggatggtcgg

SEQ ID NO: 12342 - DNA, 20 bp, Artificial
  Synthetically generated peptide
ggcctgggcggatggtcggt

SEQ ID NO: 12343 - DNA, 20 bp, Artificial
  Synthetically generated peptide
gcctgggcggatggtcggtc

SEQ ID NO: 12344 - DNA, 20 bp, Artificial
  Synthetically generated peptide
cctgggcggatggtcggtca

SEQ ID NO: 12345 - DNA, 20 bp, Artificial
  Synthetically generated peptide
ctgggcggatggtcggtcag

SEQ ID NO: 12346 - DNA, 20 bp, Artificial
  Synthetically generated peptide
tgggcggatggtcggtcagg

SEQ ID NO: 12347 - DNA, 20 bp, Artificial
  Synthetically generated peptide
ccggtgaccgcggcctgggc

SEQ ID NO: 12348 - DNA, 20 bp, Artificial
  Synthetically generated peptide
cccggtgaccgcggcctggg

SEQ ID NO: 12349 - DNA, 20 bp, Artificial
  Synthetically generated peptide
ccccggtgaccgcggcctgg

SEQ ID NO: 12350 - DNA, 20 bp, Artificial
  Synthetically generated peptide
gccccggtgaccgcggcctg

SEQ ID NO: 12351 - DNA, 20 bp, Artificial
  Synthetically generated peptide
cgccccggtgaccgcggcct

SEQ ID NO: 12352 - DNA, 20 bp, Artificial
  Synthetically generated peptide
ccgccccggtgaccgcggcc

SEQ ID NO: 12353 - DNA, 20 bp, Artificial
  Synthetically generated peptide
cccgccccggtgaccgcggc

SEQ ID NO: 12354 - DNA, 20 bp, Artificial
  Synthetically generated peptide
ccccgccccggtgaccgcgg

SEQ ID NO: 12355 - DNA, 20 bp, Artificial
  Synthetically generated peptide
cccccgccccggtgaccgcg

SEQ ID NO: 12356 - DNA, 20 bp, Artificial
  Synthetically generated peptide
gcccccgccccggtgaccgc

SEQ ID NO: 12357 - DNA, 20 bp, Artificial
  Synthetically generated peptide
ggcccccgccccggtgaccg

SEQ ID NO: 12358 - DNA, 20 bp, Artificial
  Synthetically generated peptide
tggcccccgccccggtgacc

SEQ ID NO: 12359 - DNA, 20 bp, Artificial
  Synthetically generated peptide
ctggcccccgccccggtgac

SEQ ID NO: 12360 - DNA, 20 bp, Artificial
  Synthetically generated peptide
cctggcccccgccccggtga

SEQ ID NO: 12361 - DNA, 20 bp, Artificial
  Synthetically generated peptide
ccctggcccccgccccggtg

SEQ ID NO: 12362 - DNA, 20 bp, Artificial
  Synthetically generated peptide
cccctggcccccgccccggt

SEQ ID NO: 12363 - DNA, 20 bp, Artificial
  Synthetically generated peptide
ccccctggcccccgccccgg

SEQ ID NO: 12364 - DNA, 20 bp, Artificial
  Synthetically generated peptide
gccccctggcccccgccccg

SEQ ID NO: 12365 - DNA, 20 bp, Artificial
  Synthetically generated peptide
cgccccctggcccccgcccc

SEQ ID NO: 12366 - DNA, 20 bp, Artificial
  Synthetically generated peptide
tcgccccctggcccccgccc

SEQ ID NO: 12367 - DNA, 20 bp, Artificial
  Synthetically generated peptide
ctcgccccctggcccccgcc

SEQ ID NO: 12368 - DNA, 20 bp, Artificial
  Synthetically generated peptide
cctcgccccctggcccccgc

SEQ ID NO: 12369 - DNA, 20 bp, Artificial
  Synthetically generated peptide
tcctcgccccctggcccccg

SEQ ID NO: 12370 - DNA, 20 bp, Artificial
  Synthetically generated peptide
ttcctcgccccctggccccc

SEQ ID NO: 12371 - DNA, 20 bp, Artificial
  Synthetically generated peptide
tttcctcgccccctggcccc

SEQ ID NO: 12372 - DNA, 20 bp, Artificial
  Synthetically generated peptide
ctttcctcgccccctggccc

SEQ ID NO: 12373 - DNA, 20 bp, Artificial
  Synthetically generated peptide
gctttcctcgccccctggcc

SEQ ID NO: 12374 - DNA, 20 bp, Artificial
  Synthetically generated peptide
cgctttcctcgccccctggc

SEQ ID NO: 12375 - DNA, 20 bp, Artificial
  Synthetically generated peptide
acgctttcctcgccccctgg

SEQ ID NO: 12376 - DNA, 20 bp, Artificial
  Synthetically generated peptide
cacgctttcctcgccccctg

SEQ ID NO: 12377 - DNA, 20 bp, Artificial
  Synthetically generated peptide
tcacgctttcctcgccccct

SEQ ID NO: 12378 - DNA, 20 bp, Artificial
  Synthetically generated peptide
ttcacgctttcctcgccccc

SEQ ID NO: 12379 - DNA, 20 bp, Artificial
  Synthetically generated peptide
cttcacgctttcctcgcccc

SEQ ID NO: 12380 - DNA, 20 bp, Artificial
  Synthetically generated peptide
ccttcacgctttcctcgccc

SEQ ID NO: 12381 - DNA, 20 bp, Artificial
  Synthetically generated peptide
accttcacgctttcctcgcc

SEQ ID NO: 12382 - DNA, 20 bp, Artificial
  Synthetically generated peptide
caccttcacgctttcctcgc

SEQ ID NO: 12383 - DNA, 20 bp, Artificial
  Synthetically generated peptide
tcaccttcacgctttcctcg

SEQ ID NO: 12384 - DNA, 20 bp, Artificial
  Synthetically generated peptide
atcaccttcacgctttcctc

SEQ ID NO: 12385 - DNA, 20 bp, Artificial
  Synthetically generated peptide
aatcaccttcacgctttcct

SEQ ID NO: 12386 - DNA, 20 bp, Artificial
  Synthetically generated peptide
aaatcaccttcacgctttcc

SEQ ID NO: 12387 - DNA, 20 bp, Artificial
  Synthetically generated peptide
gaaatcaccttcacgctttc

SEQ ID NO: 12388 - DNA, 25 bp, Artificial
  Synthetically generated peptide
cgggactcagcgcggctgcgcgccg

SEQ ID NO: 12389 - DNA, 20 bp, Artificial
  Synthetically generated peptide
gggactcagcgcggctgcgc

SEQ ID NO: 12390 - DNA, 20 bp, Artificial
  Synthetically generated peptide
ggactcagcgcggctgcgcg

SEQ ID NO: 12391 - DNA, 20 bp, Artificial
  Synthetically generated peptide
gactcagcgcggctgcgcgc

SEQ ID NO: 12392 - DNA, 20 bp, Artificial
  Synthetically generated peptide
actcagcgcggctgcgcgcc

SEQ ID NO: 12393 - DNA, 20 bp, Artificial
  Synthetically generated peptide
ctcagcgcggctgcgcgccg

SEQ ID NO: 12394 - DNA, 20 bp, Artificial
  Synthetically generated peptide
tcagcgcggctgcgcgccgc

SEQ ID NO: 12395 - DNA, 20 bp, Artificial
  Synthetically generated peptide
cagcgcggctgcgcgccgcg

SEQ ID NO: 12396 - DNA, 20 bp, Artificial
  Synthetically generated peptide
agcgcggctgcgcgccgcgg

SEQ ID NO: 12397 - DNA, 20 bp, Artificial
  Synthetically generated peptide
gcgcggctgcgcgccgcggg

SEQ ID NO: 12398 - DNA, 20 bp, Artificial
  Synthetically generated peptide
cgcggctgcgcgccgcgggg

SEQ ID NO: 12399 - DNA, 20 bp, Artificial
  Synthetically generated peptide
gcggctgcgcgccgcggggc

SEQ ID NO: 12400 - DNA, 20 bp, Artificial
  Synthetically generated peptide
cggctgcgcgccgcggggct

SEQ ID NO: 12401 - DNA, 20 bp, Artificial
  Synthetically generated peptide
ggctgcgcgccgcggggctc

SEQ ID NO: 12402 - DNA, 20 bp, Artificial
  Synthetically generated peptide
gctgcgcgccgcggggctcg

SEQ ID NO: 12403 - DNA, 20 bp, Artificial
  Synthetically generated peptide
ctgcgcgccgcggggctcgg

SEQ ID NO: 12404 - DNA, 20 bp, Artificial
  Synthetically generated peptide
tgcgcgccgcggggctcggg

SEQ ID NO: 12405 - DNA, 20 bp, Artificial
  Synthetically generated peptide
gcgcgccgcggggctcgggg

SEQ ID NO: 12406 - DNA, 20 bp, Artificial
  Synthetically generated peptide
cgcgccgcggggctcggggc

SEQ ID NO: 12407 - DNA, 20 bp, Artificial
  Synthetically generated peptide
gcgccgcggggctcggggct

SEQ ID NO: 12408 - DNA, 20 bp, Artificial
  Synthetically generated peptide
cgccgcggggctcggggctt

SEQ ID NO: 12409 - DNA, 20 bp, Artificial
  Synthetically generated peptide
gccgcggggctcggggcttg

SEQ ID NO: 12410 - DNA, 20 bp, Artificial
  Synthetically generated peptide
ccgcggggctcggggcttgg

SEQ ID NO: 12411 - DNA, 20 bp, Artificial
  Synthetically generated peptide
cgcggggctcggggcttggg

SEQ ID NO: 12412 - DNA, 20 bp, Artificial
  Synthetically generated peptide
gcggggctcggggcttgggt

SEQ ID NO: 12413 - DNA, 20 bp, Artificial
  Synthetically generated peptide
cggggctcggggcttgggtt

SEQ ID NO: 12414 - DNA, 20 bp, Artificial
  Synthetically generated peptide
ggggctcggggcttgggttg

SEQ ID NO: 12415 - DNA, 20 bp, Artificial
  Synthetically generated peptide
gggctcggggcttgggttgg

SEQ ID NO: 12416 - DNA, 20 bp, Artificial
  Synthetically generated peptide
ggctcggggcttgggttggg

SEQ ID NO: 12417 - DNA, 20 bp, Artificial
  Synthetically generated peptide
gctcggggcttgggttgggg

SEQ ID NO: 12418 - DNA, 20 bp, Artificial
  Synthetically generated peptide
ctcggggcttgggttggggg

SEQ ID NO: 12419 - DNA, 20 bp, Artificial
  Synthetically generated peptide
tcggggcttgggttgggggc

SEQ ID NO: 12420 - DNA, 20 bp, Artificial
  Synthetically generated peptide
cggggcttgggttgggggcg

SEQ ID NO: 12421 - DNA, 20 bp, Artificial
  Synthetically generated peptide
ccgggactcagcgcggctgc

SEQ ID NO: 12422 - DNA, 20 bp, Artificial
  Synthetically generated peptide
cccgggactcagcgcggctg

SEQ ID NO: 12423 - DNA, 20 bp, Artificial
  Synthetically generated peptide
ccccgggactcagcgcggct

SEQ ID NO: 12424 - DNA, 20 bp, Artificial
  Synthetically generated peptide
accccgggactcagcgcggc

SEQ ID NO: 12425 - DNA, 20 bp, Artificial
  Synthetically generated peptide
gaccccgggactcagcgcgg

SEQ ID NO: 12426 - DNA, 20 bp, Artificial
  Synthetically generated peptide
agaccccgggactcagcgcg

SEQ ID NO: 12427 - DNA, 20 bp, Artificial
  Synthetically generated peptide
cagaccccgggactcagcgc

SEQ ID NO: 12428 - DNA, 20 bp, Artificial
  Synthetically generated peptide
gcagaccccgggactcagcg

SEQ ID NO: 12429 - DNA, 20 bp, Artificial
  Synthetically generated peptide
cgcagaccccgggactcagc

SEQ ID NO: 12430 - DNA, 20 bp, Artificial
  Synthetically generated peptide
acgcagaccccgggactcag

SEQ ID NO: 12431 - DNA, 20 bp, Artificial
  Synthetically generated peptide
gacgcagaccccgggactca

SEQ ID NO: 12432 - DNA, 20 bp, Artificial
  Synthetically generated peptide
cgacgcagaccccgggactc

SEQ ID NO: 12433 - DNA, 20 bp, Artificial
  Synthetically generated peptide
gcgacgcagaccccgggact

SEQ ID NO: 12434 - DNA, 20 bp, Artificial
  Synthetically generated peptide
cgcgacgcagaccccgggac

SEQ ID NO: 12435 - DNA, 20 bp, Artificial
  Synthetically generated peptide
ccgcgacgcagaccccggga

SEQ ID NO: 12436 - DNA, 20 bp, Artificial
  Synthetically generated peptide
gccgcgacgcagaccccggg

SEQ ID NO: 12437 - DNA, 20 bp, Artificial
  Synthetically generated peptide
cgccgcgacgcagaccccgg

SEQ ID NO: 12438 - DNA, 20 bp, Artificial
  Synthetically generated peptide
gcgccgcgacgcagaccccg

SEQ ID NO: 12439 - DNA, 20 bp, Artificial
  Synthetically generated peptide
cgcgccgcgacgcagacccc

SEQ ID NO: 12440 - DNA, 20 bp, Artificial
  Synthetically generated peptide
gcgcgccgcgacgcagaccc

SEQ ID NO: 12441 - DNA, 20 bp, Artificial
  Synthetically generated peptide
ggcgcgccgcgacgcagacc

SEQ ID NO: 12442 - DNA, 20 bp, Artificial
  Synthetically generated peptide
cggcgcgccgcgacgcagac

SEQ ID NO: 12443 - DNA, 20 bp, Artificial
  Synthetically generated peptide
ccggcgcgccgcgacgcaga

SEQ ID NO: 12444 - DNA, 20 bp, Artificial
  Synthetically generated peptide
accggcgcgccgcgacgcag

SEQ ID NO: 12445 - DNA, 20 bp, Artificial
  Synthetically generated peptide
aaccggcgcgccgcgacgca

SEQ ID NO: 12446 - DNA, 20 bp, Artificial
  Synthetically generated peptide
gaaccggcgcgccgcgacgc

SEQ ID NO: 12447 - DNA, 20 bp, Artificial
  Synthetically generated peptide
ggaaccggcgcgccgcgacg

SEQ ID NO: 12448 - DNA, 20 bp, Artificial
  Synthetically generated peptide
aggaaccggcgcgccgcgac

SEQ ID NO: 12449 - DNA, 20 bp, Artificial
  Synthetically generated peptide
caggaaccggcgcgccgcga

SEQ ID NO: 12450 - DNA, 20 bp, Artificial
  Synthetically generated peptide
tcaggaaccggcgcgccgcg

SEQ ID NO: 12451 - DNA, 20 bp, Artificial
  Synthetically generated peptide
ttcaggaaccggcgcgccgc

SEQ ID NO: 12452 - DNA, 20 bp, Artificial
  Synthetically generated peptide
attcaggaaccggcgcgccg

SEQ ID NO: 12453 - DNA, 20 bp, Artificial
  Synthetically generated peptide
cattcaggaaccggcgcgcc

SEQ ID NO: 12454 - DNA, 20 bp, Artificial
  Synthetically generated peptide
tcattcaggaaccggcgcgc

SEQ ID NO: 12455 - DNA, 20 bp, Artificial
  Synthetically generated peptide
ttcattcaggaaccggcgcg

SEQ ID NO: 12456 - DNA, 20 bp, Artificial
  Synthetically generated peptide
gttcattcaggaaccggcgc

SEQ ID NO: 12457 - DNA, 20 bp, Artificial
  Synthetically generated peptide
cgttcattcaggaaccggcg

SEQ ID NO: 12458 - DNA, 20 bp, Artificial
  Synthetically generated peptide
gcgttcattcaggaaccggc

SEQ ID NO: 12459 - DNA, 20 bp, Artificial
  Synthetically generated peptide
cgcgttcattcaggaaccgg

SEQ ID NO: 12460 - DNA, 20 bp, Artificial
  Synthetically generated peptide
gcgcgttcattcaggaaccg

SEQ ID NO: 12461 - DNA, 20 bp, Artificial
  Synthetically generated peptide
agcgcgttcattcaggaacc

SEQ ID NO: 12462 - DNA, 20 bp, Artificial
  Synthetically generated peptide
gagcgcgttcattcaggaac

SEQ ID NO: 12463 - DNA, 20 bp, Artificial
  Synthetically generated peptide
ggagcgcgttcattcaggaa

SEQ ID NO: 12464 - DNA, 20 bp, Artificial
  Synthetically generated peptide
gggagcgcgttcattcagga

SEQ ID NO: 12465 - DNA, 20 bp, Artificial
  Synthetically generated peptide
agggagcgcgttcattcagg

SEQ ID NO: 12466 - DNA, 20 bp, Artificial
  Synthetically generated peptide
aagggagcgcgttcattcag

SEQ ID NO: 12467 - DNA, 20 bp, Artificial
  Synthetically generated peptide
gaagggagcgcgttcattca

SEQ ID NO: 12468 - DNA, 20 bp, Artificial
  Synthetically generated peptide
ggaagggagcgcgttcattc

SEQ ID NO: 12469 - DNA, 20 bp, Artificial
  Synthetically generated peptide
gggaagggagcgcgttcatt

SEQ ID NO: 12470 - DNA, 23 bp, Artificial
  Synthetically generated peptide
gacccgcgcagaggcacagacgc

SEQ ID NO: 12471 - DNA, 20 bp, Artificial
  Synthetically generated peptide
acccgcgcagaggcacagac

SEQ ID NO: 12472 - DNA, 20 bp, Artificial
  Synthetically generated peptide
cccgcgcagaggcacagacg

SEQ ID NO: 12473 - DNA, 20 bp, Artificial
  Synthetically generated peptide
ccgcgcagaggcacagacgc

SEQ ID NO: 12474 - DNA, 20 bp, Artificial
  Synthetically generated peptide
cgcgcagaggcacagacgca

SEQ ID NO: 12475 - DNA, 20 bp, Artificial
  Synthetically generated peptide
gcgcagaggcacagacgcac

SEQ ID NO: 12476 - DNA, 20 bp, Artificial
  Synthetically generated peptide
cgcagaggcacagacgcacg

SEQ ID NO: 12477 - DNA, 20 bp, Artificial
  Synthetically generated peptide
gcagaggcacagacgcacgc

SEQ ID NO: 12478 - DNA, 20 bp, Artificial
  Synthetically generated peptide
cagaggcacagacgcacgcg

SEQ ID NO: 12479 - DNA, 20 bp, Artificial
  Synthetically generated peptide
agaggcacagacgcacgcgc

SEQ ID NO: 12480 - DNA, 20 bp, Artificial
  Synthetically generated peptide
gaggcacagacgcacgcgcc

SEQ ID NO: 12481 - DNA, 20 bp, Artificial
  Synthetically generated peptide
aggcacagacgcacgcgccg

SEQ ID NO: 12482 - DNA, 20 bp, Artificial
  Synthetically generated peptide
ggcacagacgcacgcgccgc

SEQ ID NO: 12483 - DNA, 20 bp, Artificial
  Synthetically generated peptide
gcacagacgcacgcgccgcg

SEQ ID NO: 12484 - DNA, 20 bp, Artificial
  Synthetically generated peptide
cacagacgcacgcgccgcgg

SEQ ID NO: 12485 - DNA, 20 bp, Artificial
  Synthetically generated peptide
acagacgcacgcgccgcggc

SEQ ID NO: 12486 - DNA, 20 bp, Artificial
  Synthetically generated peptide
cagacgcacgcgccgcggcc

SEQ ID NO: 12487 - DNA, 20 bp, Artificial
  Synthetically generated peptide
agacccgcgcagaggcacag

SEQ ID NO: 12488 - DNA, 20 bp, Artificial
  Synthetically generated peptide
gagacccgcgcagaggcaca

SEQ ID NO: 12489 - DNA, 20 bp, Artificial
  Synthetically generated peptide
ggagacccgcgcagaggcac

SEQ ID NO: 12490 - DNA, 32 bp, Artificial
  Synthetically generated peptide
cgccaccgccggcgccaggccccgcccccgcg

SEQ ID NO: 12491 - DNA, 20 bp, Artificial
  Synthetically generated peptide
gccaccgccggcgccaggcc

SEQ ID NO: 12492 - DNA, 20 bp, Artificial
  Synthetically generated peptide
ccaccgccggcgccaggccc

SEQ ID NO: 12493 - DNA, 20 bp, Artificial
  Synthetically generated peptide
caccgccggcgccaggcccc

SEQ ID NO: 12494 - DNA, 20 bp, Artificial
  Synthetically generated peptide
accgccggcgccaggccccg

SEQ ID NO: 12495 - DNA, 20 bp, Artificial
  Synthetically generated peptide
ccgccggcgccaggccccgc

SEQ ID NO: 12496 - DNA, 20 bp, Artificial
  Synthetically generated peptide
cgccggcgccaggccccgcc

SEQ ID NO: 12497 - DNA, 20 bp, Artificial
  Synthetically generated peptide
gccggcgccaggccccgccc

SEQ ID NO: 12498 - DNA, 20 bp, Artificial
  Synthetically generated peptide
ccggcgccaggccccgcccc

SEQ ID NO: 12499 - DNA, 20 bp, Artificial
  Synthetically generated peptide
cggcgccaggccccgccccc

SEQ ID NO: 12500 - DNA, 20 bp, Artificial
  Synthetically generated peptide
ggcgccaggccccgcccccg

SEQ ID NO: 12501 - DNA, 20 bp, Artificial
  Synthetically generated peptide
gcgccaggccccgcccccgc

SEQ ID NO: 12502 - DNA, 20 bp, Artificial
  Synthetically generated peptide
cgccaggccccgcccccgcg

SEQ ID NO: 12503 - DNA, 20 bp, Artificial
  Synthetically generated peptide
gccaggccccgcccccgcga

SEQ ID NO: 12504 - DNA, 20 bp, Artificial
  Synthetically generated peptide
ccaggccccgcccccgcgag

SEQ ID NO: 12505 - DNA, 20 bp, Artificial
  Synthetically generated peptide
caggccccgcccccgcgagg

SEQ ID NO: 12506 - DNA, 20 bp, Artificial
  Synthetically generated peptide
aggccccgcccccgcgaggc

SEQ ID NO: 12507 - DNA, 20 bp, Artificial
  Synthetically generated peptide
ggccccgcccccgcgaggct

SEQ ID NO: 12508 - DNA, 20 bp, Artificial
  Synthetically generated peptide
gccccgcccccgcgaggctg

SEQ ID NO: 12509 - DNA, 20 bp, Artificial
  Synthetically generated peptide
ccccgcccccgcgaggctgc

SEQ ID NO: 12510 - DNA, 20 bp, Artificial
  Synthetically generated peptide
cccgcccccgcgaggctgcg

SEQ ID NO: 12511 - DNA, 20 bp, Artificial
  Synthetically generated peptide
ccgcccccgcgaggctgcgg

SEQ ID NO: 12512 - DNA, 20 bp, Artificial
  Synthetically generated peptide
cgcccccgcgaggctgcggc

SEQ ID NO: 12513 - DNA, 20 bp, Artificial
  Synthetically generated peptide
gcccccgcgaggctgcggct

SEQ ID NO: 12514 - DNA, 20 bp, Artificial
  Synthetically generated peptide
cccccgcgaggctgcggctc

SEQ ID NO: 12515 - DNA, 20 bp, Artificial
  Synthetically generated peptide
ccccgcgaggctgcggctcc

SEQ ID NO: 12516 - DNA, 20 bp, Artificial
  Synthetically generated peptide
cccgcgaggctgcggctccg

SEQ ID NO: 12517 - DNA, 20 bp, Artificial
  Synthetically generated peptide
ccgcgaggctgcggctccgc

SEQ ID NO: 12518 - DNA, 20 bp, Artificial
  Synthetically generated peptide
cgcgaggctgcggctccgcc

SEQ ID NO: 12519 - DNA, 20 bp, Artificial
  Synthetically generated peptide
gcgaggctgcggctccgccc

SEQ ID NO: 12520 - DNA, 20 bp, Artificial
  Synthetically generated peptide
cgaggctgcggctccgcccc

SEQ ID NO: 12521 - DNA, 20 bp, Artificial
  Synthetically generated peptide
gaggctgcggctccgccccg

SEQ ID NO: 12522 - DNA, 20 bp, Artificial
  Synthetically generated peptide
aggctgcggctccgccccga

SEQ ID NO: 12523 - DNA, 20 bp, Artificial
  Synthetically generated peptide
ggctgcggctccgccccgag

SEQ ID NO: 12524 - DNA, 20 bp, Artificial
  Synthetically generated peptide
gctgcggctccgccccgagt

SEQ ID NO: 12525 - DNA, 20 bp, Artificial
  Synthetically generated peptide
ctgcggctccgccccgagtg

SEQ ID NO: 12526 - DNA, 20 bp, Artificial
  Synthetically generated peptide
tgcggctccgccccgagtgg

SEQ ID NO: 12527 - DNA, 20 bp, Artificial
  Synthetically generated peptide
gcggctccgccccgagtggg

SEQ ID NO: 12528 - DNA, 20 bp, Artificial
  Synthetically generated peptide
cggctccgccccgagtgggg

SEQ ID NO: 12529 - DNA, 20 bp, Artificial
  Synthetically generated peptide
ggctccgccccgagtgggga

SEQ ID NO: 12530 - DNA, 20 bp, Artificial
  Synthetically generated peptide
gctccgccccgagtggggaa

SEQ ID NO: 12531 - DNA, 20 bp, Artificial
  Synthetically generated peptide
ctccgccccgagtggggaag

SEQ ID NO: 12532 - DNA, 20 bp, Artificial
  Synthetically generated peptide
tccgccccgagtggggaagt

SEQ ID NO: 12533 - DNA, 20 bp, Artificial
  Synthetically generated peptide
ccgccccgagtggggaagtc

SEQ ID NO: 12534 - DNA, 20 bp, Artificial
  Synthetically generated peptide
cgccccgagtggggaagtca

SEQ ID NO: 12535 - DNA, 20 bp, Artificial
  Synthetically generated peptide
gccccgagtggggaagtcac

SEQ ID NO: 12536 - DNA, 20 bp, Artificial
  Synthetically generated peptide
ccccgagtggggaagtcacc

SEQ ID NO: 12537 - DNA, 20 bp, Artificial
  Synthetically generated peptide
cccgagtggggaagtcaccg

SEQ ID NO: 12538 - DNA, 20 bp, Artificial
  Synthetically generated peptide
ccgagtggggaagtcaccgc

SEQ ID NO: 12539 - DNA, 20 bp, Artificial
  Synthetically generated peptide
cgagtggggaagtcaccgcc

SEQ ID NO: 12540 - DNA, 20 bp, Artificial
  Synthetically generated peptide
gagtggggaagtcaccgcct

SEQ ID NO: 12541 - DNA, 20 bp, Artificial
  Synthetically generated peptide
agtggggaagtcaccgcctg

SEQ ID NO: 12542 - DNA, 20 bp, Artificial
  Synthetically generated peptide
gtggggaagtcaccgcctgc

SEQ ID NO: 12543 - DNA, 20 bp, Artificial
  Synthetically generated peptide
tggggaagtcaccgcctgcc

SEQ ID NO: 12544 - DNA, 20 bp, Artificial
  Synthetically generated peptide
ggggaagtcaccgcctgcct

SEQ ID NO: 12545 - DNA, 20 bp, Artificial
  Synthetically generated peptide
gggaagtcaccgcctgcctc

SEQ ID NO: 12546 - DNA, 20 bp, Artificial
  Synthetically generated peptide
ggaagtcaccgcctgcctcg

SEQ ID NO: 12547 - DNA, 20 bp, Artificial
  Synthetically generated peptide
gaagtcaccgcctgcctcgg

SEQ ID NO: 12548 - DNA, 20 bp, Artificial
  Synthetically generated peptide
aagtcaccgcctgcctcggc

SEQ ID NO: 12549 - DNA, 20 bp, Artificial
  Synthetically generated peptide
agtcaccgcctgcctcggct

SEQ ID NO: 12550 - DNA, 20 bp, Artificial
  Synthetically generated peptide
gtcaccgcctgcctcggctc

SEQ ID NO: 12551 - DNA, 20 bp, Artificial
  Synthetically generated peptide
tcaccgcctgcctcggctcg

SEQ ID NO: 12552 - DNA, 20 bp, Artificial
  Synthetically generated peptide
caccgcctgcctcggctcga

SEQ ID NO: 12553 - DNA, 20 bp, Artificial
  Synthetically generated peptide
accgcctgcctcggctcgac

SEQ ID NO: 12554 - DNA, 20 bp, Artificial
  Synthetically generated peptide
ccgcctgcctcggctcgacc

SEQ ID NO: 12555 - DNA, 20 bp, Artificial
  Synthetically generated peptide
cgcctgcctcggctcgaccc

SEQ ID NO: 12556 - DNA, 20 bp, Artificial
  Synthetically generated peptide
gcctgcctcggctcgacccc

SEQ ID NO: 12557 - DNA, 20 bp, Artificial
  Synthetically generated peptide
cctgcctcggctcgaccccc

SEQ ID NO: 12558 - DNA, 20 bp, Artificial
  Synthetically generated peptide
ctgcctcggctcgacccccg

SEQ ID NO: 12559 - DNA, 20 bp, Artificial
  Synthetically generated peptide
tgcctcggctcgacccccgc

SEQ ID NO: 12560 - DNA, 20 bp, Artificial
  Synthetically generated peptide
gcctcggctcgacccccgca

SEQ ID NO: 12561 - DNA, 20 bp, Artificial
  Synthetically generated peptide
cctcggctcgacccccgcag

SEQ ID NO: 12562 - DNA, 20 bp, Artificial
  Synthetically generated peptide
ctcggctcgacccccgcagg

SEQ ID NO: 12563 - DNA, 20 bp, Artificial
  Synthetically generated peptide
tcggctcgacccccgcaggg

SEQ ID NO: 12564 - DNA, 20 bp, Artificial
  Synthetically generated peptide
cggctcgacccccgcagggc

SEQ ID NO: 12565 - DNA, 20 bp, Artificial
  Synthetically generated peptide
ggctcgacccccgcagggca

SEQ ID NO: 12566 - DNA, 20 bp, Artificial
  Synthetically generated peptide
gctcgacccccgcagggcag

SEQ ID NO: 12567 - DNA, 20 bp, Artificial
  Synthetically generated peptide
ctcgacccccgcagggcagg

SEQ ID NO: 12568 - DNA, 20 bp, Artificial
  Synthetically generated peptide
tcgacccccgcagggcagga

SEQ ID NO: 12569 - DNA, 20 bp, Artificial
  Synthetically generated peptide
cgacccccgcagggcaggac

SEQ ID NO: 12570 - DNA, 20 bp, Artificial
  Synthetically generated peptide
gacccccgcagggcaggacc

SEQ ID NO: 12571 - DNA, 20 bp, Artificial
  Synthetically generated peptide
acccccgcagggcaggaccc

SEQ ID NO: 12572 - DNA, 20 bp, Artificial
  Synthetically generated peptide
cccccgcagggcaggaccct

SEQ ID NO: 12573 - DNA, 20 bp, Artificial
  Synthetically generated peptide
ccccgcagggcaggaccctg

SEQ ID NO: 12574 - DNA, 20 bp, Artificial
  Synthetically generated peptide
cccgcagggcaggaccctgg

SEQ ID NO: 12575 - DNA, 20 bp, Artificial
  Synthetically generated peptide
ccgcagggcaggaccctggg

SEQ ID NO: 12576 - DNA, 20 bp, Artificial
  Synthetically generated peptide
cgcagggcaggaccctgggc

SEQ ID NO: 12577 - DNA, 20 bp, Artificial
  Synthetically generated peptide
gcagggcaggaccctgggcg

SEQ ID NO: 12578 - DNA, 20 bp, Artificial
  Synthetically generated peptide
cagggcaggaccctgggcga

SEQ ID NO: 12579 - DNA, 20 bp, Artificial
  Synthetically generated peptide
agggcaggaccctgggcgac

SEQ ID NO: 12580 - DNA, 20 bp, Artificial
  Synthetically generated peptide
gggcaggaccctgggcgact

SEQ ID NO: 12581 - DNA, 20 bp, Artificial
  Synthetically generated peptide
ggcaggaccctgggcgactc

SEQ ID NO: 12582 - DNA, 20 bp, Artificial
  Synthetically generated peptide
gcaggaccctgggcgactcc

SEQ ID NO: 12583 - DNA, 20 bp, Artificial
  Synthetically generated peptide
caggaccctgggcgactccg

SEQ ID NO: 12584 - DNA, 20 bp, Artificial
  Synthetically generated peptide
aggaccctgggcgactccgc

SEQ ID NO: 12585 - DNA, 20 bp, Artificial
  Synthetically generated peptide
ggaccctgggcgactccgcc

SEQ ID NO: 12586 - DNA, 20 bp, Artificial
  Synthetically generated peptide
gaccctgggcgactccgccc

SEQ ID NO: 12587 - DNA, 20 bp, Artificial
  Synthetically generated peptide
accctgggcgactccgcccg

SEQ ID NO: 12588 - DNA, 20 bp, Artificial
  Synthetically generated peptide
ccctgggcgactccgcccgt

SEQ ID NO: 12589 - DNA, 20 bp, Artificial
  Synthetically generated peptide
cctgggcgactccgcccgtt

SEQ ID NO: 12590 - DNA, 20 bp, Artificial
  Synthetically generated peptide
ctgggcgactccgcccgttc

SEQ ID NO: 12591 - DNA, 20 bp, Artificial
  Synthetically generated peptide
tgggcgactccgcccgttcc

SEQ ID NO: 12592 - DNA, 20 bp, Artificial
  Synthetically generated peptide
gggcgactccgcccgttcct

SEQ ID NO: 12593 - DNA, 20 bp, Artificial
  Synthetically generated peptide
ggcgactccgcccgttcctc

SEQ ID NO: 12594 - DNA, 20 bp, Artificial
  Synthetically generated peptide
gcgactccgcccgttcctcc

SEQ ID NO: 12595 - DNA, 20 bp, Artificial
  Synthetically generated peptide
cgactccgcccgttcctcca

SEQ ID NO: 12596 - DNA, 20 bp, Artificial
  Synthetically generated peptide
gactccgcccgttcctccag

SEQ ID NO: 12597 - DNA, 20 bp, Artificial
  Synthetically generated peptide
actccgcccgttcctccagc

SEQ ID NO: 12598 - DNA, 20 bp, Artificial
  Synthetically generated peptide
ctccgcccgttcctccagca

SEQ ID NO: 12599 - DNA, 20 bp, Artificial
  Synthetically generated peptide
tccgcccgttcctccagcaa

SEQ ID NO: 12600 - DNA, 20 bp, Artificial
  Synthetically generated peptide
ccgcccgttcctccagcaac

SEQ ID NO: 12601 - DNA, 20 bp, Artificial
  Synthetically generated peptide
cgcccgttcctccagcaacc

SEQ ID NO: 12602 - DNA, 20 bp, Artificial
  Synthetically generated peptide
gcccgttcctccagcaaccg

SEQ ID NO: 12603 - DNA, 20 bp, Artificial
  Synthetically generated peptide
cccgttcctccagcaaccgc

SEQ ID NO: 12604 - DNA, 20 bp, Artificial
  Synthetically generated peptide
ccgttcctccagcaaccgcc

SEQ ID NO: 12605 - DNA, 20 bp, Artificial
  Synthetically generated peptide
cgttcctccagcaaccgccg

SEQ ID NO: 12606 - DNA, 20 bp, Artificial
  Synthetically generated peptide
gttcctccagcaaccgccgc

SEQ ID NO: 12607 - DNA, 20 bp, Artificial
  Synthetically generated peptide
ttcctccagcaaccgccgct

SEQ ID NO: 12608 - DNA, 20 bp, Artificial
  Synthetically generated peptide
tcctccagcaaccgccgcta

SEQ ID NO: 12609 - DNA, 20 bp, Artificial
  Synthetically generated peptide
cctccagcaaccgccgctaa

SEQ ID NO: 12610 - DNA, 20 bp, Artificial
  Synthetically generated peptide
ctccagcaaccgccgctaag

SEQ ID NO: 12611 - DNA, 20 bp, Artificial
  Synthetically generated peptide
tccagcaaccgccgctaagc

SEQ ID NO: 12612 - DNA, 20 bp, Artificial
  Synthetically generated peptide
ccagcaaccgccgctaagcc

SEQ ID NO: 12613 - DNA, 20 bp, Artificial
  Synthetically generated peptide
cagcaaccgccgctaagccc

SEQ ID NO: 12614 - DNA, 20 bp, Artificial
  Synthetically generated peptide
agcaaccgccgctaagcccg

SEQ ID NO: 12615 - DNA, 20 bp, Artificial
  Synthetically generated peptide
gcaaccgccgctaagcccgg

SEQ ID NO: 12616 - DNA, 20 bp, Artificial
  Synthetically generated peptide
caaccgccgctaagcccggc

SEQ ID NO: 12617 - DNA, 20 bp, Artificial
  Synthetically generated peptide
aaccgccgctaagcccggcg

SEQ ID NO: 12618 - DNA, 20 bp, Artificial
  Synthetically generated peptide
accgccgctaagcccggcgc

SEQ ID NO: 12619 - DNA, 20 bp, Artificial
  Synthetically generated peptide
ccgccgctaagcccggcgca

SEQ ID NO: 12620 - DNA, 20 bp, Artificial
  Synthetically generated peptide
cgccgctaagcccggcgcac

SEQ ID NO: 12621 - DNA, 20 bp, Artificial
  Synthetically generated peptide
gccgctaagcccggcgcacc

SEQ ID NO: 12622 - DNA, 20 bp, Artificial
  Synthetically generated peptide
ccgctaagcccggcgcaccg

SEQ ID NO: 12623 - DNA, 20 bp, Artificial
  Synthetically generated peptide
cgctaagcccggcgcaccgc

SEQ ID NO: 12624 - DNA, 20 bp, Artificial
  Synthetically generated peptide
gctaagcccggcgcaccgct

SEQ ID NO: 12625 - DNA, 20 bp, Artificial
  Synthetically generated peptide
ctaagcccggcgcaccgctc

SEQ ID NO: 12626 - DNA, 20 bp, Artificial
  Synthetically generated peptide
taagcccggcgcaccgctcc

SEQ ID NO: 12627 - DNA, 20 bp, Artificial
  Synthetically generated peptide
aagcccggcgcaccgctcca

SEQ ID NO: 12628 - DNA, 20 bp, Artificial
  Synthetically generated peptide
agcccggcgcaccgctccaa

SEQ ID NO: 12629 - DNA, 20 bp, Artificial
  Synthetically generated peptide
gcccggcgcaccgctccaac

SEQ ID NO: 12630 - DNA, 20 bp, Artificial
  Synthetically generated peptide
cccggcgcaccgctccaacc

SEQ ID NO: 12631 - DNA, 20 bp, Artificial
  Synthetically generated peptide
ccggcgcaccgctccaacct

SEQ ID NO: 12632 - DNA, 20 bp, Artificial
  Synthetically generated peptide
cggcgcaccgctccaacctg

SEQ ID NO: 12633 - DNA, 20 bp, Artificial
  Synthetically generated peptide
ggcgcaccgctccaacctgt

SEQ ID NO: 12634 - DNA, 20 bp, Artificial
  Synthetically generated peptide
gcgcaccgctccaacctgtt

SEQ ID NO: 12635 - DNA, 20 bp, Artificial
  Synthetically generated peptide
cgcaccgctccaacctgttc

SEQ ID NO: 12636 - DNA, 20 bp, Artificial
  Synthetically generated peptide
gcaccgctccaacctgttct

SEQ ID NO: 12637 - DNA, 20 bp, Artificial
  Synthetically generated peptide
caccgctccaacctgttctc

SEQ ID NO: 12638 - DNA, 20 bp, Artificial
  Synthetically generated peptide
accgctccaacctgttctcc

SEQ ID NO: 12639 - DNA, 20 bp, Artificial
  Synthetically generated peptide
ccgctccaacctgttctcca

SEQ ID NO: 12640 - DNA, 20 bp, Artificial
  Synthetically generated peptide
cgctccaacctgttctccac

SEQ ID NO: 12641 - DNA, 20 bp, Artificial
  Synthetically generated peptide
acgccaccgccggcgccagg

SEQ ID NO: 12642 - DNA, 20 bp, Artificial
  Synthetically generated peptide
gacgccaccgccggcgccag

SEQ ID NO: 12643 - DNA, 20 bp, Artificial
  Synthetically generated peptide
tgacgccaccgccggcgcca

SEQ ID NO: 12644 - DNA, 20 bp, Artificial
  Synthetically generated peptide
gtgacgccaccgccggcgcc

SEQ ID NO: 12645 - DNA, 20 bp, Artificial
  Synthetically generated peptide
tgtgacgccaccgccggcgc

SEQ ID NO: 12646 - DNA, 20 bp, Artificial
  Synthetically generated peptide
ttgtgacgccaccgccggcg

SEQ ID NO: 12647 - DNA, 20 bp, Artificial
  Synthetically generated peptide
tttgtgacgccaccgccggc

SEQ ID NO: 12648 - DNA, 20 bp, Artificial
  Synthetically generated peptide
ttttgtgacgccaccgccgg

SEQ ID NO: 12649 - DNA, 20 bp, Artificial
  Synthetically generated peptide
cttttgtgacgccaccgccg

SEQ ID NO: 12650 - DNA, 20 bp, Artificial
  Synthetically generated peptide
ccttttgtgacgccaccgcc

SEQ ID NO: 12651 - DNA, 20 bp, Artificial
  Synthetically generated peptide
gccttttgtgacgccaccgc

SEQ ID NO: 12652 - DNA, 20 bp, Artificial
  Synthetically generated peptide
cgccttttgtgacgccaccg

SEQ ID NO: 12653 - DNA, 20 bp, Artificial
  Synthetically generated peptide
ccgccttttgtgacgccacc

SEQ ID NO: 12654 - DNA, 20 bp, Artificial
  Synthetically generated peptide
cccgccttttgtgacgccac

SEQ ID NO: 12655 - DNA, 20 bp, Artificial
  Synthetically generated peptide
tcccgccttttgtgacgcca

SEQ ID NO: 12656 - DNA, 20 bp, Artificial
  Synthetically generated peptide
gtcccgccttttgtgacgcc

SEQ ID NO: 12657 - DNA, 20 bp, Artificial
  Synthetically generated peptide
ggtcccgccttttgtgacgc

SEQ ID NO: 12658 - DNA, 20 bp, Artificial
  Synthetically generated peptide
tggtcccgccttttgtgacg

SEQ ID NO: 12659 - DNA, 20 bp, Artificial
  Synthetically generated peptide
gtggtcccgccttttgtgac

SEQ ID NO: 12660 - DNA, 20 bp, Artificial
  Synthetically generated peptide
tgtggtcccgccttttgtga

SEQ ID NO: 12661 - DNA, 20 bp, Artificial
  Synthetically generated peptide
ctgtggtcccgccttttgtg

SEQ ID NO: 12662 - DNA, 20 bp, Artificial
  Synthetically generated peptide
actgtggtcccgccttttgt

SEQ ID NO: 12663 - DNA, 20 bp, Artificial
  Synthetically generated peptide
cactgtggtcccgccttttg

SEQ ID NO: 12664 - DNA, 20 bp, Artificial
  Synthetically generated peptide
ccactgtggtcccgcctttt

SEQ ID NO: 12665 - DNA, 20 bp, Artificial
  Synthetically generated peptide
accactgtggtcccgccttt

SEQ ID NO: 12666 - DNA, 20 bp, Artificial
  Synthetically generated peptide
caccactgtggtcccgcctt

SEQ ID NO: 12667 - DNA, 20 bp, Artificial
  Synthetically generated peptide
acaccactgtggtcccgcct

SEQ ID NO: 12668 - DNA, 20 bp, Artificial
  Synthetically generated peptide
gacaccactgtggtcccgcc

SEQ ID NO: 12669 - DNA, 20 bp, Artificial
  Synthetically generated peptide
ggacaccactgtggtcccgc

SEQ ID NO: 12670 - DNA, 20 bp, Artificial
  Synthetically generated peptide
cggacaccactgtggtcccg

SEQ ID NO: 12671 - DNA, 20 bp, Artificial
  Synthetically generated peptide
tcggacaccactgtggtccc

SEQ ID NO: 12672 - DNA, 20 bp, Artificial
  Synthetically generated peptide
ctcggacaccactgtggtcc

SEQ ID NO: 12673 - DNA, 20 bp, Artificial
  Synthetically generated peptide
tctcggacaccactgtggtc

SEQ ID NO: 12674 - DNA, 20 bp, Artificial
  Synthetically generated peptide
ttctcggacaccactgtggt

SEQ ID NO: 12675 - DNA, 20 bp, Artificial
  Synthetically generated peptide
cttctcggacaccactgtgg

SEQ ID NO: 12676 - DNA, 20 bp, Artificial
  Synthetically generated peptide
acttctcggacaccactgtg

SEQ ID NO: 12677 - DNA, 20 bp, Artificial
  Synthetically generated peptide
gacttctcggacaccactgt

SEQ ID NO: 12678 - DNA, 20 bp, Artificial
  Synthetically generated peptide
tgacttctcggacaccactg

SEQ ID NO: 12679 - DNA, 20 bp, Artificial
  Synthetically generated peptide
ctgacttctcggacaccact

SEQ ID NO: 12680 - DNA, 20 bp, Artificial
  Synthetically generated peptide
cctgacttctcggacaccac

SEQ ID NO: 12681 - DNA, 20 bp, Artificial
  Synthetically generated peptide
gcctgacttctcggacacca

SEQ ID NO: 12682 - DNA, 20 bp, Artificial
  Synthetically generated peptide
tgcctgacttctcggacacc

SEQ ID NO: 12683 - DNA, 20 bp, Artificial
  Synthetically generated peptide
gtgcctgacttctcggacac

SEQ ID NO: 12684 - DNA, 20 bp, Artificial
  Synthetically generated peptide
cgtgcctgacttctcggaca

SEQ ID NO: 12685 - DNA, 20 bp, Artificial
  Synthetically generated peptide
acgtgcctgacttctcggac

SEQ ID NO: 12686 - DNA, 20 bp, Artificial
  Synthetically generated peptide
tacgtgcctgacttctcgga

SEQ ID NO: 12687 - DNA, 20 bp, Artificial
  Synthetically generated peptide
ctacgtgcctgacttctcgg

SEQ ID NO: 12688 - DNA, 20 bp, Artificial
  Synthetically generated peptide
gctacgtgcctgacttctcg

SEQ ID NO: 12689 - DNA, 20 bp, Artificial
  Synthetically generated peptide
agctacgtgcctgacttctc

SEQ ID NO: 12690 - DNA, 20 bp, Artificial
  Synthetically generated peptide
gagctacgtgcctgacttct

SEQ ID NO: 12691 - DNA, 20 bp, Artificial
  Synthetically generated peptide
tgagctacgtgcctgacttc

SEQ ID NO: 12692 - DNA, 20 bp, Artificial
  Synthetically generated peptide
ctgagctacgtgcctgactt

SEQ ID NO: 12693 - DNA, 20 bp, Artificial
  Synthetically generated peptide
gctgagctacgtgcctgact

SEQ ID NO: 12694 - DNA, 20 bp, Artificial
  Synthetically generated peptide
cgctgagctacgtgcctgac

SEQ ID NO: 12695 - DNA, 20 bp, Artificial
  Synthetically generated peptide
ccgctgagctacgtgcctga

SEQ ID NO: 12696 - DNA, 20 bp, Artificial
  Synthetically generated peptide
gccgctgagctacgtgcctg

SEQ ID NO: 12697 - DNA, 20 bp, Artificial
  Synthetically generated peptide
cgccgctgagctacgtgcct

SEQ ID NO: 12698 - DNA, 20 bp, Artificial
  Synthetically generated peptide
ccgccgctgagctacgtgcc

SEQ ID NO: 12699 - DNA, 20 bp, Artificial
  Synthetically generated peptide
gccgccgctgagctacgtgc

SEQ ID NO: 12700 - DNA, 20 bp, Artificial
  Synthetically generated peptide
ggccgccgctgagctacgtg

SEQ ID NO: 12701 - DNA, 32 bp, Artificial
  Synthetically generated peptide
cgttcctccagcaaccgccgctaagcccggcg

SEQ ID NO: 12702 - DNA, 20 bp, Artificial
  Synthetically generated peptide
gttcctccagcaaccgccgc

SEQ ID NO: 12703 - DNA, 20 bp, Artificial
  Synthetically generated peptide
ttcctccagcaaccgccgct

SEQ ID NO: 12704 - DNA, 20 bp, Artificial
  Synthetically generated peptide
tcctccagcaaccgccgcta

SEQ ID NO: 12705 - DNA, 20 bp, Artificial
  Synthetically generated peptide
cctccagcaaccgccgctaa

SEQ ID NO: 12706 - DNA, 20 bp, Artificial
  Synthetically generated peptide
ctccagcaaccgccgctaag

SEQ ID NO: 12707 - DNA, 20 bp, Artificial
  Synthetically generated peptide
tccagcaaccgccgctaagc

SEQ ID NO: 12708 - DNA, 20 bp, Artificial
  Synthetically generated peptide
ccagcaaccgccgctaagcc

SEQ ID NO: 12709 - DNA, 20 bp, Artificial
  Synthetically generated peptide
cagcaaccgccgctaagccc

SEQ ID NO: 12710 - DNA, 20 bp, Artificial
  Synthetically generated peptide
agcaaccgccgctaagcccg

SEQ ID NO: 12711 - DNA, 20 bp, Artificial
  Synthetically generated peptide
gcaaccgccgctaagcccgg

SEQ ID NO: 12712 - DNA, 20 bp, Artificial
  Synthetically generated peptide
caaccgccgctaagcccggc

SEQ ID NO: 12713 - DNA, 20 bp, Artificial
  Synthetically generated peptide
aaccgccgctaagcccggcg

SEQ ID NO: 12714 - DNA, 20 bp, Artificial
  Synthetically generated peptide
accgccgctaagcccggcgc

SEQ ID NO: 12715 - DNA, 20 bp, Artificial
  Synthetically generated peptide
ccgccgctaagcccggcgca

SEQ ID NO: 12716 - DNA, 20 bp, Artificial
  Synthetically generated peptide
cgccgctaagcccggcgcac

SEQ ID NO: 12717 - DNA, 20 bp, Artificial
  Synthetically generated peptide
gccgctaagcccggcgcacc

SEQ ID NO: 12718 - DNA, 20 bp, Artificial
  Synthetically generated peptide
ccgctaagcccggcgcaccg

SEQ ID NO: 12719 - DNA, 20 bp, Artificial
  Synthetically generated peptide
cgctaagcccggcgcaccgc

SEQ ID NO: 12720 - DNA, 20 bp, Artificial
  Synthetically generated peptide
gctaagcccggcgcaccgct

SEQ ID NO: 12721 - DNA, 20 bp, Artificial
  Synthetically generated peptide
ctaagcccggcgcaccgctc

SEQ ID NO: 12722 - DNA, 20 bp, Artificial
  Synthetically generated peptide
taagcccggcgcaccgctcc

SEQ ID NO: 12723 - DNA, 20 bp, Artificial
  Synthetically generated peptide
aagcccggcgcaccgctcca

SEQ ID NO: 12724 - DNA, 20 bp, Artificial
  Synthetically generated peptide
agcccggcgcaccgctccaa

SEQ ID NO: 12725 - DNA, 20 bp, Artificial
  Synthetically generated peptide
gcccggcgcaccgctccaac

SEQ ID NO: 12726 - DNA, 20 bp, Artificial
  Synthetically generated peptide
cccggcgcaccgctccaacc

SEQ ID NO: 12727 - DNA, 20 bp, Artificial
  Synthetically generated peptide
ccggcgcaccgctccaacct

SEQ ID NO: 12728 - DNA, 20 bp, Artificial
  Synthetically generated peptide
cggcgcaccgctccaacctg

SEQ ID NO: 12729 - DNA, 20 bp, Artificial
  Synthetically generated peptide
ggcgcaccgctccaacctgt

SEQ ID NO: 12730 - DNA, 20 bp, Artificial
  Synthetically generated peptide
gcgcaccgctccaacctgtt

SEQ ID NO: 12731 - DNA, 20 bp, Artificial
  Synthetically generated peptide
cgcaccgctccaacctgttc

SEQ ID NO: 12732 - DNA, 20 bp, Artificial
  Synthetically generated peptide
gcaccgctccaacctgttct

SEQ ID NO: 12733 - DNA, 20 bp, Artificial
  Synthetically generated peptide
caccgctccaacctgttctc

SEQ ID NO: 12734 - DNA, 20 bp, Artificial
  Synthetically generated peptide
accgctccaacctgttctcc

SEQ ID NO: 12735 - DNA, 20 bp, Artificial
  Synthetically generated peptide
ccgctccaacctgttctcca

SEQ ID NO: 12736 - DNA, 20 bp, Artificial
  Synthetically generated peptide
cgctccaacctgttctccac

SEQ ID NO: 12737 - DNA, 20 bp, Artificial
  Synthetically generated peptide
ccgttcctccagcaaccgcc

SEQ ID NO: 12738 - DNA, 20 bp, Artificial
  Synthetically generated peptide
cccgttcctccagcaaccgc

SEQ ID NO: 12739 - DNA, 20 bp, Artificial
  Synthetically generated peptide
gcccgttcctccagcaaccg

SEQ ID NO: 12740 - DNA, 20 bp, Artificial
  Synthetically generated peptide
cgcccgttcctccagcaacc

SEQ ID NO: 12741 - DNA, 20 bp, Artificial
  Synthetically generated peptide
ccgcccgttcctccagcaac

SEQ ID NO: 12742 - DNA, 20 bp, Artificial
  Synthetically generated peptide
tccgcccgttcctccagcaa

SEQ ID NO: 12743 - DNA, 20 bp, Artificial
  Synthetically generated peptide
ctccgcccgttcctccagca

SEQ ID NO: 12744 - DNA, 20 bp, Artificial
  Synthetically generated peptide
actccgcccgttcctccagc

SEQ ID NO: 12745 - DNA, 20 bp, Artificial
  Synthetically generated peptide
gactccgcccgttcctccag

SEQ ID NO: 12746 - DNA, 20 bp, Artificial
  Synthetically generated peptide
cgactccgcccgttcctcca

SEQ ID NO: 12747 - DNA, 20 bp, Artificial
  Synthetically generated peptide
gcgactccgcccgttcctcc

SEQ ID NO: 12748 - DNA, 20 bp, Artificial
  Synthetically generated peptide
ggcgactccgcccgttcctc

SEQ ID NO: 12749 - DNA, 20 bp, Artificial
  Synthetically generated peptide
gggcgactccgcccgttcct

SEQ ID NO: 12750 - DNA, 20 bp, Artificial
  Synthetically generated peptide
tgggcgactccgcccgttcc

SEQ ID NO: 12751 - DNA, 20 bp, Artificial
  Synthetically generated peptide
ctgggcgactccgcccgttc

SEQ ID NO: 12752 - DNA, 20 bp, Artificial
  Synthetically generated peptide
cctgggcgactccgcccgtt

SEQ ID NO: 12753 - DNA, 20 bp, Artificial
  Synthetically generated peptide
ccctgggcgactccgcccgt

SEQ ID NO: 12754 - DNA, 20 bp, Artificial
  Synthetically generated peptide
accctgggcgactccgcccg

SEQ ID NO: 12755 - DNA, 20 bp, Artificial
  Synthetically generated peptide
gaccctgggcgactccgccc

SEQ ID NO: 12756 - DNA, 20 bp, Artificial
  Synthetically generated peptide
ggaccctgggcgactccgcc

SEQ ID NO: 12757 - DNA, 20 bp, Artificial
  Synthetically generated peptide
aggaccctgggcgactccgc

SEQ ID NO: 12758 - DNA, 20 bp, Artificial
  Synthetically generated peptide
caggaccctgggcgactccg

SEQ ID NO: 12759 - DNA, 20 bp, Artificial
  Synthetically generated peptide
gcaggaccctgggcgactcc

SEQ ID NO: 12760 - DNA, 20 bp, Artificial
  Synthetically generated peptide
ggcaggaccctgggcgactc

SEQ ID NO: 12761 - DNA, 20 bp, Artificial
  Synthetically generated peptide
gggcaggaccctgggcgact

SEQ ID NO: 12762 - DNA, 20 bp, Artificial
  Synthetically generated peptide
agggcaggaccctgggcgac

SEQ ID NO: 12763 - DNA, 20 bp, Artificial
  Synthetically generated peptide
cagggcaggaccctgggcga

SEQ ID NO: 12764 - DNA, 20 bp, Artificial
  Synthetically generated peptide
gcagggcaggaccctgggcg

SEQ ID NO: 12765 - DNA, 20 bp, Artificial
  Synthetically generated peptide
cgcagggcaggaccctgggc

SEQ ID NO: 12766 - DNA, 20 bp, Artificial
  Synthetically generated peptide
ccgcagggcaggaccctggg

SEQ ID NO: 12767 - DNA, 20 bp, Artificial
  Synthetically generated peptide
cccgcagggcaggaccctgg

SEQ ID NO: 12768 - DNA, 20 bp, Artificial
  Synthetically generated peptide
ccccgcagggcaggaccctg

SEQ ID NO: 12769 - DNA, 20 bp, Artificial
  Synthetically generated peptide
cccccgcagggcaggaccct

SEQ ID NO: 12770 - DNA, 20 bp, Artificial
  Synthetically generated peptide
acccccgcagggcaggaccc

SEQ ID NO: 12771 - DNA, 20 bp, Artificial
  Synthetically generated peptide
gacccccgcagggcaggacc

SEQ ID NO: 12772 - DNA, 20 bp, Artificial
  Synthetically generated peptide
cgacccccgcagggcaggac

SEQ ID NO: 12773 - DNA, 20 bp, Artificial
  Synthetically generated peptide
tcgacccccgcagggcagga

SEQ ID NO: 12774 - DNA, 20 bp, Artificial
  Synthetically generated peptide
ctcgacccccgcagggcagg

SEQ ID NO: 12775 - DNA, 20 bp, Artificial
  Synthetically generated peptide
gctcgacccccgcagggcag

SEQ ID NO: 12776 - DNA, 20 bp, Artificial
  Synthetically generated peptide
ggctcgacccccgcagggca

SEQ ID NO: 12777 - DNA, 20 bp, Artificial
  Synthetically generated peptide
cggctcgacccccgcagggc

SEQ ID NO: 12778 - DNA, 20 bp, Artificial
  Synthetically generated peptide
tcggctcgacccccgcaggg

SEQ ID NO: 12779 - DNA, 20 bp, Artificial
  Synthetically generated peptide
ctcggctcgacccccgcagg

SEQ ID NO: 12780 - DNA, 20 bp, Artificial
  Synthetically generated peptide
cctcggctcgacccccgcag

SEQ ID NO: 12781 - DNA, 20 bp, Artificial
  Synthetically generated peptide
gcctcggctcgacccccgca

SEQ ID NO: 12782 - DNA, 20 bp, Artificial
  Synthetically generated peptide
tgcctcggctcgacccccgc

SEQ ID NO: 12783 - DNA, 20 bp, Artificial
  Synthetically generated peptide
ctgcctcggctcgacccccg

SEQ ID NO: 12784 - DNA, 20 bp, Artificial
  Synthetically generated peptide
cctgcctcggctcgaccccc

SEQ ID NO: 12785 - DNA, 20 bp, Artificial
  Synthetically generated peptide
gcctgcctcggctcgacccc

SEQ ID NO: 12786 - DNA, 20 bp, Artificial
  Synthetically generated peptide
cgcctgcctcggctcgaccc

SEQ ID NO: 12787 - DNA, 20 bp, Artificial
  Synthetically generated peptide
ccgcctgcctcggctcgacc

SEQ ID NO: 12788 - DNA, 20 bp, Artificial
  Synthetically generated peptide
accgcctgcctcggctcgac

SEQ ID NO: 12789 - DNA, 20 bp, Artificial
  Synthetically generated peptide
caccgcctgcctcggctcga

SEQ ID NO: 12790 - DNA, 20 bp, Artificial
  Synthetically generated peptide
tcaccgcctgcctcggctcg

SEQ ID NO: 12791 - DNA, 20 bp, Artificial
  Synthetically generated peptide
gtcaccgcctgcctcggctc

SEQ ID NO: 12792 - DNA, 20 bp, Artificial
  Synthetically generated peptide
agtcaccgcctgcctcggct

SEQ ID NO: 12793 - DNA, 20 bp, Artificial
  Synthetically generated peptide
aagtcaccgcctgcctcggc

SEQ ID NO: 12794 - DNA, 20 bp, Artificial
  Synthetically generated peptide
gaagtcaccgcctgcctcgg

SEQ ID NO: 12795 - DNA, 20 bp, Artificial
  Synthetically generated peptide
ggaagtcaccgcctgcctcg

SEQ ID NO: 12796 - DNA, 20 bp, Artificial
  Synthetically generated peptide
gggaagtcaccgcctgcctc

SEQ ID NO: 12797 - DNA, 20 bp, Artificial
  Synthetically generated peptide
ggggaagtcaccgcctgcct

SEQ ID NO: 12798 - DNA, 20 bp, Artificial
  Synthetically generated peptide
tggggaagtcaccgcctgcc

SEQ ID NO: 12799 - DNA, 20 bp, Artificial
  Synthetically generated peptide
gtggggaagtcaccgcctgc

SEQ ID NO: 12800 - DNA, 20 bp, Artificial
  Synthetically generated peptide
agtggggaagtcaccgcctg

SEQ ID NO: 12801 - DNA, 20 bp, Artificial
  Synthetically generated peptide
gagtggggaagtcaccgcct

SEQ ID NO: 12802 - DNA, 20 bp, Artificial
  Synthetically generated peptide
cgagtggggaagtcaccgcc

SEQ ID NO: 12803 - DNA, 20 bp, Artificial
  Synthetically generated peptide
ccgagtggggaagtcaccgc

SEQ ID NO: 12804 - DNA, 20 bp, Artificial
  Synthetically generated peptide
cccgagtggggaagtcaccg

SEQ ID NO: 12805 - DNA, 20 bp, Artificial
  Synthetically generated peptide
ccccgagtggggaagtcacc

SEQ ID NO: 12806 - DNA, 20 bp, Artificial
  Synthetically generated peptide
gccccgagtggggaagtcac

SEQ ID NO: 12807 - DNA, 20 bp, Artificial
  Synthetically generated peptide
cgccccgagtggggaagtca

SEQ ID NO: 12808 - DNA, 20 bp, Artificial
  Synthetically generated peptide
ccgccccgagtggggaagtc

SEQ ID NO: 12809 - DNA, 20 bp, Artificial
  Synthetically generated peptide
tccgccccgagtggggaagt

SEQ ID NO: 12810 - DNA, 20 bp, Artificial
  Synthetically generated peptide
ctccgccccgagtggggaag

SEQ ID NO: 12811 - DNA, 20 bp, Artificial
  Synthetically generated peptide
gctccgccccgagtggggaa

SEQ ID NO: 12812 - DNA, 20 bp, Artificial
  Synthetically generated peptide
ggctccgccccgagtgggga

SEQ ID NO: 12813 - DNA, 20 bp, Artificial
  Synthetically generated peptide
cggctccgccccgagtgggg

SEQ ID NO: 12814 - DNA, 20 bp, Artificial
  Synthetically generated peptide
gcggctccgccccgagtggg

SEQ ID NO: 12815 - DNA, 20 bp, Artificial
  Synthetically generated peptide
tgcggctccgccccgagtgg

SEQ ID NO: 12816 - DNA, 20 bp, Artificial
  Synthetically generated peptide
ctgcggctccgccccgagtg

SEQ ID NO: 12817 - DNA, 20 bp, Artificial
  Synthetically generated peptide
gctgcggctccgccccgagt

SEQ ID NO: 12818 - DNA, 20 bp, Artificial
  Synthetically generated peptide
ggctgcggctccgccccgag

SEQ ID NO: 12819 - DNA, 20 bp, Artificial
  Synthetically generated peptide
aggctgcggctccgccccga

SEQ ID NO: 12820 - DNA, 20 bp, Artificial
  Synthetically generated peptide
gaggctgcggctccgccccg

SEQ ID NO: 12821 - DNA, 20 bp, Artificial
  Synthetically generated peptide
cgaggctgcggctccgcccc

SEQ ID NO: 12822 - DNA, 20 bp, Artificial
  Synthetically generated peptide
gcgaggctgcggctccgccc

SEQ ID NO: 12823 - DNA, 20 bp, Artificial
  Synthetically generated peptide
cgcgaggctgcggctccgcc

SEQ ID NO: 12824 - DNA, 20 bp, Artificial
  Synthetically generated peptide
ccgcgaggctgcggctccgc

SEQ ID NO: 12825 - DNA, 20 bp, Artificial
  Synthetically generated peptide
cccgcgaggctgcggctccg

SEQ ID NO: 12826 - DNA, 20 bp, Artificial
  Synthetically generated peptide
ccccgcgaggctgcggctcc

SEQ ID NO: 12827 - DNA, 20 bp, Artificial
  Synthetically generated peptide
cccccgcgaggctgcggctc

SEQ ID NO: 12828 - DNA, 20 bp, Artificial
  Synthetically generated peptide
gcccccgcgaggctgcggct

SEQ ID NO: 12829 - DNA, 20 bp, Artificial
  Synthetically generated peptide
cgcccccgcgaggctgcggc

SEQ ID NO: 12830 - DNA, 20 bp, Artificial
  Synthetically generated peptide
ccgcccccgcgaggctgcgg

SEQ ID NO: 12831 - DNA, 20 bp, Artificial
  Synthetically generated peptide
cccgcccccgcgaggctgcg

SEQ ID NO: 12832 - DNA, 20 bp, Artificial
  Synthetically generated peptide
ccccgcccccgcgaggctgc

SEQ ID NO: 12833 - DNA, 20 bp, Artificial
  Synthetically generated peptide
gccccgcccccgcgaggctg

SEQ ID NO: 12834 - DNA, 20 bp, Artificial
  Synthetically generated peptide
ggccccgcccccgcgaggct

SEQ ID NO: 12835 - DNA, 20 bp, Artificial
  Synthetically generated peptide
aggccccgcccccgcgaggc

SEQ ID NO: 12836 - DNA, 20 bp, Artificial
  Synthetically generated peptide
caggccccgcccccgcgagg

SEQ ID NO: 12837 - DNA, 20 bp, Artificial
  Synthetically generated peptide
ccaggccccgcccccgcgag

SEQ ID NO: 12838 - DNA, 20 bp, Artificial
  Synthetically generated peptide
gccaggccccgcccccgcga

SEQ ID NO: 12839 - DNA, 20 bp, Artificial
  Synthetically generated peptide
cgccaggccccgcccccgcg

SEQ ID NO: 12840 - DNA, 20 bp, Artificial
  Synthetically generated peptide
gcgccaggccccgcccccgc

SEQ ID NO: 12841 - DNA, 20 bp, Artificial
  Synthetically generated peptide
ggcgccaggccccgcccccg

SEQ ID NO: 12842 - DNA, 20 bp, Artificial
  Synthetically generated peptide
cggcgccaggccccgccccc

SEQ ID NO: 12843 - DNA, 20 bp, Artificial
  Synthetically generated peptide
ccggcgccaggccccgcccc

SEQ ID NO: 12844 - DNA, 20 bp, Artificial
  Synthetically generated peptide
gccggcgccaggccccgccc

SEQ ID NO: 12845 - DNA, 20 bp, Artificial
  Synthetically generated peptide
cgccggcgccaggccccgcc

SEQ ID NO: 12846 - DNA, 20 bp, Artificial
  Synthetically generated peptide
ccgccggcgccaggccccgc

SEQ ID NO: 12847 - DNA, 20 bp, Artificial
  Synthetically generated peptide
accgccggcgccaggccccg

SEQ ID NO: 12848 - DNA, 20 bp, Artificial
  Synthetically generated peptide
caccgccggcgccaggcccc

SEQ ID NO: 12849 - DNA, 20 bp, Artificial
  Synthetically generated peptide
ccaccgccggcgccaggccc

SEQ ID NO: 12850 - DNA, 20 bp, Artificial
  Synthetically generated peptide
gccaccgccggcgccaggcc

SEQ ID NO: 12851 - DNA, 20 bp, Artificial
  Synthetically generated peptide
cgccaccgccggcgccaggc

SEQ ID NO: 12852 - DNA, 20 bp, Artificial
  Synthetically generated peptide
acgccaccgccggcgccagg

SEQ ID NO: 12853 - DNA, 20 bp, Artificial
  Synthetically generated peptide
gacgccaccgccggcgccag

SEQ ID NO: 12854 - DNA, 20 bp, Artificial
  Synthetically generated peptide
tgacgccaccgccggcgcca

SEQ ID NO: 12855 - DNA, 20 bp, Artificial
  Synthetically generated peptide
gtgacgccaccgccggcgcc

SEQ ID NO: 12856 - DNA, 20 bp, Artificial
  Synthetically generated peptide
tgtgacgccaccgccggcgc

SEQ ID NO: 12857 - DNA, 20 bp, Artificial
  Synthetically generated peptide
ttgtgacgccaccgccggcg

SEQ ID NO: 12858 - DNA, 20 bp, Artificial
  Synthetically generated peptide
tttgtgacgccaccgccggc

SEQ ID NO: 12859 - DNA, 20 bp, Artificial
  Synthetically generated peptide
ttttgtgacgccaccgccgg

SEQ ID NO: 12860 - DNA, 20 bp, Artificial
  Synthetically generated peptide
cttttgtgacgccaccgccg

SEQ ID NO: 12861 - DNA, 20 bp, Artificial
  Synthetically generated peptide
ccttttgtgacgccaccgcc

SEQ ID NO: 12862 - DNA, 20 bp, Artificial
  Synthetically generated peptide
gccttttgtgacgccaccgc

SEQ ID NO: 12863 - DNA, 20 bp, Artificial
  Synthetically generated peptide
cgccttttgtgacgccaccg

SEQ ID NO: 12864 - DNA, 20 bp, Artificial
  Synthetically generated peptide
ccgccttttgtgacgccacc

SEQ ID NO: 12865 - DNA, 20 bp, Artificial
  Synthetically generated peptide
cccgccttttgtgacgccac

SEQ ID NO: 12866 - DNA, 20 bp, Artificial
  Synthetically generated peptide
tcccgccttttgtgacgcca

SEQ ID NO: 12867 - DNA, 20 bp, Artificial
  Synthetically generated peptide
gtcccgccttttgtgacgcc

SEQ ID NO: 12868 - DNA, 20 bp, Artificial
  Synthetically generated peptide
ggtcccgccttttgtgacgc

SEQ ID NO: 12869 - DNA, 20 bp, Artificial
  Synthetically generated peptide
tggtcccgccttttgtgacg

SEQ ID NO: 12870 - DNA, 20 bp, Artificial
  Synthetically generated peptide
gtggtcccgccttttgtgac

SEQ ID NO: 12871 - DNA, 20 bp, Artificial
  Synthetically generated peptide
tgtggtcccgccttttgtga

SEQ ID NO: 12872 - DNA, 20 bp, Artificial
  Synthetically generated peptide
ctgtggtcccgccttttgtg

SEQ ID NO: 12873 - DNA, 20 bp, Artificial
  Synthetically generated peptide
actgtggtcccgccttttgt

SEQ ID NO: 12874 - DNA, 20 bp, Artificial
  Synthetically generated peptide
cactgtggtcccgccttttg

SEQ ID NO: 12875 - DNA, 20 bp, Artificial
  Synthetically generated peptide
ccactgtggtcccgcctttt

SEQ ID NO: 12876 - DNA, 20 bp, Artificial
  Synthetically generated peptide
accactgtggtcccgccttt

SEQ ID NO: 12877 - DNA, 20 bp, Artificial
  Synthetically generated peptide
caccactgtggtcccgcctt

SEQ ID NO: 12878 - DNA, 20 bp, Artificial
  Synthetically generated peptide
acaccactgtggtcccgcct

SEQ ID NO: 12879 - DNA, 20 bp, Artificial
  Synthetically generated peptide
gacaccactgtggtcccgcc

SEQ ID NO: 12880 - DNA, 20 bp, Artificial
  Synthetically generated peptide
ggacaccactgtggtcccgc

SEQ ID NO: 12881 - DNA, 20 bp, Artificial
  Synthetically generated peptide
cggacaccactgtggtcccg

SEQ ID NO: 12882 - DNA, 20 bp, Artificial
  Synthetically generated peptide
tcggacaccactgtggtccc

SEQ ID NO: 12883 - DNA, 20 bp, Artificial
  Synthetically generated peptide
ctcggacaccactgtggtcc

SEQ ID NO: 12884 - DNA, 20 bp, Artificial
  Synthetically generated peptide
tctcggacaccactgtggtc

SEQ ID NO: 12885 - DNA, 20 bp, Artificial
  Synthetically generated peptide
ttctcggacaccactgtggt

SEQ ID NO: 12886 - DNA, 20 bp, Artificial
  Synthetically generated peptide
cttctcggacaccactgtgg

SEQ ID NO: 12887 - DNA, 20 bp, Artificial
  Synthetically generated peptide
acttctcggacaccactgtg

SEQ ID NO: 12888 - DNA, 20 bp, Artificial
  Synthetically generated peptide
gacttctcggacaccactgt

SEQ ID NO: 12889 - DNA, 20 bp, Artificial
  Synthetically generated peptide
tgacttctcggacaccactg

SEQ ID NO: 12890 - DNA, 20 bp, Artificial
  Synthetically generated peptide
ctgacttctcggacaccact

SEQ ID NO: 12891 - DNA, 20 bp, Artificial
  Synthetically generated peptide
cctgacttctcggacaccac

SEQ ID NO: 12892 - DNA, 20 bp, Artificial
  Synthetically generated peptide
gcctgacttctcggacacca

SEQ ID NO: 12893 - DNA, 20 bp, Artificial
  Synthetically generated peptide
tgcctgacttctcggacacc

SEQ ID NO: 12894 - DNA, 20 bp, Artificial
  Synthetically generated peptide
gtgcctgacttctcggacac

SEQ ID NO: 12895 - DNA, 20 bp, Artificial
  Synthetically generated peptide
cgtgcctgacttctcggaca

SEQ ID NO: 12896 - DNA, 20 bp, Artificial
  Synthetically generated peptide
acgtgcctgacttctcggac

SEQ ID NO: 12897 - DNA, 20 bp, Artificial
  Synthetically generated peptide
tacgtgcctgacttctcgga

SEQ ID NO: 12898 - DNA, 20 bp, Artificial
  Synthetically generated peptide
ctacgtgcctgacttctcgg

SEQ ID NO: 12899 - DNA, 20 bp, Artificial
  Synthetically generated peptide
gctacgtgcctgacttctcg

SEQ ID NO: 12900 - DNA, 20 bp, Artificial
  Synthetically generated peptide
agctacgtgcctgacttctc

SEQ ID NO: 12901 - DNA, 20 bp, Artificial
  Synthetically generated peptide
gagctacgtgcctgacttct

SEQ ID NO: 12902 - DNA, 20 bp, Artificial
  Synthetically generated peptide
tgagctacgtgcctgacttc

SEQ ID NO: 12903 - DNA, 20 bp, Artificial
  Synthetically generated peptide
ctgagctacgtgcctgactt

SEQ ID NO: 12904 - DNA, 20 bp, Artificial
  Synthetically generated peptide
gctgagctacgtgcctgact

SEQ ID NO: 12905 - DNA, 20 bp, Artificial
  Synthetically generated peptide
cgctgagctacgtgcctgac

SEQ ID NO: 12906 - DNA, 20 bp, Artificial
  Synthetically generated peptide
ccgctgagctacgtgcctga

SEQ ID NO: 12907 - DNA, 20 bp, Artificial
  Synthetically generated peptide
gccgctgagctacgtgcctg

SEQ ID NO: 12908 - DNA, 20 bp, Artificial
  Synthetically generated peptide
cgccgctgagctacgtgcct

SEQ ID NO: 12909 - DNA, 20 bp, Artificial
  Synthetically generated peptide
ccgccgctgagctacgtgcc

SEQ ID NO: 12910 - DNA, 20 bp, Artificial
  Synthetically generated peptide
gccgccgctgagctacgtgc

SEQ ID NO: 12911 - DNA, 20 bp, Artificial
  Synthetically generated peptide
ggccgccgctgagctacgtg

SEQ ID NO: 12912 - DNA, 26 bp, Artificial
  Synthetically generated peptide
cgcctgcctcggctcgacccccgcag

SEQ ID NO: 12913 - DNA, 20 bp, Artificial
  Synthetically generated peptide
gcctgcctcggctcgacccc

SEQ ID NO: 12914 - DNA, 20 bp, Artificial
  Synthetically generated peptide
cctgcctcggctcgaccccc

SEQ ID NO: 12915 - DNA, 20 bp, Artificial
  Synthetically generated peptide
ctgcctcggctcgacccccg

SEQ ID NO: 12916 - DNA, 20 bp, Artificial
  Synthetically generated peptide
tgcctcggctcgacccccgc

SEQ ID NO: 12917 - DNA, 20 bp, Artificial
  Synthetically generated peptide
gcctcggctcgacccccgca

SEQ ID NO: 12918 - DNA, 20 bp, Artificial
  Synthetically generated peptide
cctcggctcgacccccgcag

SEQ ID NO: 12919 - DNA, 20 bp, Artificial
  Synthetically generated peptide
ctcggctcgacccccgcagg

SEQ ID NO: 12920 - DNA, 20 bp, Artificial
  Synthetically generated peptide
tcggctcgacccccgcaggg

SEQ ID NO: 12921 - DNA, 20 bp, Artificial
  Synthetically generated peptide
cggctcgacccccgcagggc

SEQ ID NO: 12922 - DNA, 20 bp, Artificial
  Synthetically generated peptide
ggctcgacccccgcagggca

SEQ ID NO: 12923 - DNA, 20 bp, Artificial
  Synthetically generated peptide
gctcgacccccgcagggcag

SEQ ID NO: 12924 - DNA, 20 bp, Artificial
  Synthetically generated peptide
ctcgacccccgcagggcagg

SEQ ID NO: 12925 - DNA, 20 bp, Artificial
  Synthetically generated peptide
tcgacccccgcagggcagga

SEQ ID NO: 12926 - DNA, 20 bp, Artificial
  Synthetically generated peptide
cgacccccgcagggcaggac

SEQ ID NO: 12927 - DNA, 20 bp, Artificial
  Synthetically generated peptide
gacccccgcagggcaggacc

SEQ ID NO: 12928 - DNA, 20 bp, Artificial
  Synthetically generated peptide
acccccgcagggcaggaccc

SEQ ID NO: 12929 - DNA, 20 bp, Artificial
  Synthetically generated peptide
cccccgcagggcaggaccct

SEQ ID NO: 12930 - DNA, 20 bp, Artificial
  Synthetically generated peptide
ccccgcagggcaggaccctg

SEQ ID NO: 12931 - DNA, 20 bp, Artificial
  Synthetically generated peptide
cccgcagggcaggaccctgg

SEQ ID NO: 12932 - DNA, 20 bp, Artificial
  Synthetically generated peptide
ccgcagggcaggaccctggg

SEQ ID NO: 12933 - DNA, 20 bp, Artificial
  Synthetically generated peptide
cgcagggcaggaccctgggc

SEQ ID NO: 12934 - DNA, 20 bp, Artificial
  Synthetically generated peptide
gcagggcaggaccctgggcg

SEQ ID NO: 12935 - DNA, 20 bp, Artificial
  Synthetically generated peptide
cagggcaggaccctgggcga

SEQ ID NO: 12936 - DNA, 20 bp, Artificial
  Synthetically generated peptide
agggcaggaccctgggcgac

SEQ ID NO: 12937 - DNA, 20 bp, Artificial
  Synthetically generated peptide
gggcaggaccctgggcgact

SEQ ID NO: 12938 - DNA, 20 bp, Artificial
  Synthetically generated peptide
ggcaggaccctgggcgactc

SEQ ID NO: 12939 - DNA, 20 bp, Artificial
  Synthetically generated peptide
gcaggaccctgggcgactcc

SEQ ID NO: 12940 - DNA, 20 bp, Artificial
  Synthetically generated peptide
caggaccctgggcgactccg

SEQ ID NO: 12941 - DNA, 20 bp, Artificial
  Synthetically generated peptide
aggaccctgggcgactccgc

SEQ ID NO: 12942 - DNA, 20 bp, Artificial
  Synthetically generated peptide
ggaccctgggcgactccgcc

SEQ ID NO: 12943 - DNA, 20 bp, Artificial
  Synthetically generated peptide
gaccctgggcgactccgccc

SEQ ID NO: 12944 - DNA, 20 bp, Artificial
  Synthetically generated peptide
accctgggcgactccgcccg

SEQ ID NO: 12945 - DNA, 20 bp, Artificial
  Synthetically generated peptide
ccctgggcgactccgcccgt

SEQ ID NO: 12946 - DNA, 20 bp, Artificial
  Synthetically generated peptide
cctgggcgactccgcccgtt

SEQ ID NO: 12947 - DNA, 20 bp, Artificial
  Synthetically generated peptide
ctgggcgactccgcccgttc

SEQ ID NO: 12948 - DNA, 20 bp, Artificial
  Synthetically generated peptide
tgggcgactccgcccgttcc

SEQ ID NO: 12949 - DNA, 20 bp, Artificial
  Synthetically generated peptide
gggcgactccgcccgttcct

SEQ ID NO: 12950 - DNA, 20 bp, Artificial
  Synthetically generated peptide
ggcgactccgcccgttcctc

SEQ ID NO: 12951 - DNA, 20 bp, Artificial
  Synthetically generated peptide
gcgactccgcccgttcctcc

SEQ ID NO: 12952 - DNA, 20 bp, Artificial
  Synthetically generated peptide
cgactccgcccgttcctcca

SEQ ID NO: 12953 - DNA, 20 bp, Artificial
  Synthetically generated peptide
gactccgcccgttcctccag

SEQ ID NO: 12954 - DNA, 20 bp, Artificial
  Synthetically generated peptide
actccgcccgttcctccagc

SEQ ID NO: 12955 - DNA, 20 bp, Artificial
  Synthetically generated peptide
ctccgcccgttcctccagca

SEQ ID NO: 12956 - DNA, 20 bp, Artificial
  Synthetically generated peptide
tccgcccgttcctccagcaa

SEQ ID NO: 12957 - DNA, 20 bp, Artificial
  Synthetically generated peptide
ccgcccgttcctccagcaac

SEQ ID NO: 12958 - DNA, 20 bp, Artificial
  Synthetically generated peptide
cgcccgttcctccagcaacc

SEQ ID NO: 12959 - DNA, 20 bp, Artificial
  Synthetically generated peptide
gcccgttcctccagcaaccg

SEQ ID NO: 12960 - DNA, 20 bp, Artificial
  Synthetically generated peptide
cccgttcctccagcaaccgc

SEQ ID NO: 12961 - DNA, 20 bp, Artificial
  Synthetically generated peptide
ccgttcctccagcaaccgcc

SEQ ID NO: 12962 - DNA, 20 bp, Artificial
  Synthetically generated peptide
cgttcctccagcaaccgccg

SEQ ID NO: 12963 - DNA, 20 bp, Artificial
  Synthetically generated peptide
gttcctccagcaaccgccgc

SEQ ID NO: 12964 - DNA, 20 bp, Artificial
  Synthetically generated peptide
ttcctccagcaaccgccgct

SEQ ID NO: 12965 - DNA, 20 bp, Artificial
  Synthetically generated peptide
tcctccagcaaccgccgcta

SEQ ID NO: 12966 - DNA, 20 bp, Artificial
  Synthetically generated peptide
cctccagcaaccgccgctaa

SEQ ID NO: 12967 - DNA, 20 bp, Artificial
  Synthetically generated peptide
ctccagcaaccgccgctaag

SEQ ID NO: 12968 - DNA, 20 bp, Artificial
  Synthetically generated peptide
tccagcaaccgccgctaagc

SEQ ID NO: 12969 - DNA, 20 bp, Artificial
  Synthetically generated peptide
ccagcaaccgccgctaagcc

SEQ ID NO: 12970 - DNA, 20 bp, Artificial
  Synthetically generated peptide
cagcaaccgccgctaagccc

SEQ ID NO: 12971 - DNA, 20 bp, Artificial
  Synthetically generated peptide
agcaaccgccgctaagcccg

SEQ ID NO: 12972 - DNA, 20 bp, Artificial
  Synthetically generated peptide
gcaaccgccgctaagcccgg

SEQ ID NO: 12973 - DNA, 20 bp, Artificial
  Synthetically generated peptide
caaccgccgctaagcccggc

SEQ ID NO: 12974 - DNA, 20 bp, Artificial
  Synthetically generated peptide
aaccgccgctaagcccggcg

SEQ ID NO: 12975 - DNA, 20 bp, Artificial
  Synthetically generated peptide
accgccgctaagcccggcgc

SEQ ID NO: 12976 - DNA, 20 bp, Artificial
  Synthetically generated peptide
ccgccgctaagcccggcgca

SEQ ID NO: 12977 - DNA, 20 bp, Artificial
  Synthetically generated peptide
cgccgctaagcccggcgcac

SEQ ID NO: 12978 - DNA, 20 bp, Artificial
  Synthetically generated peptide
gccgctaagcccggcgcacc

SEQ ID NO: 12979 - DNA, 20 bp, Artificial
  Synthetically generated peptide
ccgctaagcccggcgcaccg

SEQ ID NO: 12980 - DNA, 20 bp, Artificial
  Synthetically generated peptide
cgctaagcccggcgcaccgc

SEQ ID NO: 12981 - DNA, 20 bp, Artificial
  Synthetically generated peptide
gctaagcccggcgcaccgct

SEQ ID NO: 12982 - DNA, 20 bp, Artificial
  Synthetically generated peptide
ctaagcccggcgcaccgctc

SEQ ID NO: 12983 - DNA, 20 bp, Artificial
  Synthetically generated peptide
taagcccggcgcaccgctcc

SEQ ID NO: 12984 - DNA, 20 bp, Artificial
  Synthetically generated peptide
aagcccggcgcaccgctcca

SEQ ID NO: 12985 - DNA, 20 bp, Artificial
  Synthetically generated peptide
agcccggcgcaccgctccaa

SEQ ID NO: 12986 - DNA, 20 bp, Artificial
  Synthetically generated peptide
gcccggcgcaccgctccaac

SEQ ID NO: 12987 - DNA, 20 bp, Artificial
  Synthetically generated peptide
cccggcgcaccgctccaacc

SEQ ID NO: 12988 - DNA, 20 bp, Artificial
  Synthetically generated peptide
ccggcgcaccgctccaacct

SEQ ID NO: 12989 - DNA, 20 bp, Artificial
  Synthetically generated peptide
cggcgcaccgctccaacctg

SEQ ID NO: 12990 - DNA, 20 bp, Artificial
  Synthetically generated peptide
ggcgcaccgctccaacctgt

SEQ ID NO: 12991 - DNA, 20 bp, Artificial
  Synthetically generated peptide
gcgcaccgctccaacctgtt

SEQ ID NO: 12992 - DNA, 20 bp, Artificial
  Synthetically generated peptide
cgcaccgctccaacctgttc

SEQ ID NO: 12993 - DNA, 20 bp, Artificial
  Synthetically generated peptide
gcaccgctccaacctgttct

SEQ ID NO: 12994 - DNA, 20 bp, Artificial
  Synthetically generated peptide
caccgctccaacctgttctc

SEQ ID NO: 12995 - DNA, 20 bp, Artificial
  Synthetically generated peptide
accgctccaacctgttctcc

SEQ ID NO: 12996 - DNA, 20 bp, Artificial
  Synthetically generated peptide
ccgctccaacctgttctcca

SEQ ID NO: 12997 - DNA, 20 bp, Artificial
  Synthetically generated peptide
cgctccaacctgttctccac

SEQ ID NO: 12998 - DNA, 20 bp, Artificial
  Synthetically generated peptide
ccgcctgcctcggctcgacc

SEQ ID NO: 12999 - DNA, 20 bp, Artificial
  Synthetically generated peptide
accgcctgcctcggctcgac

SEQ ID NO: 13000 - DNA, 20 bp, Artificial
  Synthetically generated peptide
caccgcctgcctcggctcga

SEQ ID NO: 13001 - DNA, 20 bp, Artificial
  Synthetically generated peptide
tcaccgcctgcctcggctcg

SEQ ID NO: 13002 - DNA, 20 bp, Artificial
  Synthetically generated peptide
gtcaccgcctgcctcggctc

SEQ ID NO: 13003 - DNA, 20 bp, Artificial
  Synthetically generated peptide
agtcaccgcctgcctcggct

SEQ ID NO: 13004 - DNA, 20 bp, Artificial
  Synthetically generated peptide
aagtcaccgcctgcctcggc

SEQ ID NO: 13005 - DNA, 20 bp, Artificial
  Synthetically generated peptide
gaagtcaccgcctgcctcgg

SEQ ID NO: 13006 - DNA, 20 bp, Artificial
  Synthetically generated peptide
ggaagtcaccgcctgcctcg

SEQ ID NO: 13007 - DNA, 20 bp, Artificial
  Synthetically generated peptide
gggaagtcaccgcctgcctc

SEQ ID NO: 13008 - DNA, 20 bp, Artificial
  Synthetically generated peptide
ggggaagtcaccgcctgcct

SEQ ID NO: 13009 - DNA, 20 bp, Artificial
  Synthetically generated peptide
tggggaagtcaccgcctgcc

SEQ ID NO: 13010 - DNA, 20 bp, Artificial
  Synthetically generated peptide
gtggggaagtcaccgcctgc

SEQ ID NO: 13011 - DNA, 20 bp, Artificial
  Synthetically generated peptide
agtggggaagtcaccgcctg

SEQ ID NO: 13012 - DNA, 20 bp, Artificial
  Synthetically generated peptide
gagtggggaagtcaccgcct

SEQ ID NO: 13013 - DNA, 20 bp, Artificial
  Synthetically generated peptide
cgagtggggaagtcaccgcc

SEQ ID NO: 13014 - DNA, 20 bp, Artificial
  Synthetically generated peptide
ccgagtggggaagtcaccgc

SEQ ID NO: 13015 - DNA, 20 bp, Artificial
  Synthetically generated peptide
cccgagtggggaagtcaccg

SEQ ID NO: 13016 - DNA, 20 bp, Artificial
  Synthetically generated peptide
ccccgagtggggaagtcacc

SEQ ID NO: 13017 - DNA, 20 bp, Artificial
  Synthetically generated peptide
gccccgagtggggaagtcac

SEQ ID NO: 13018 - DNA, 20 bp, Artificial
  Synthetically generated peptide
cgccccgagtggggaagtca

SEQ ID NO: 13019 - DNA, 20 bp, Artificial
  Synthetically generated peptide
ccgccccgagtggggaagtc

SEQ ID NO: 13020 - DNA, 20 bp, Artificial
  Synthetically generated peptide
tccgccccgagtggggaagt

SEQ ID NO: 13021 - DNA, 20 bp, Artificial
  Synthetically generated peptide
ctccgccccgagtggggaag

SEQ ID NO: 13022 - DNA, 20 bp, Artificial
  Synthetically generated peptide
gctccgccccgagtggggaa

SEQ ID NO: 13023 - DNA, 20 bp, Artificial
  Synthetically generated peptide
ggctccgccccgagtgggga

SEQ ID NO: 13024 - DNA, 20 bp, Artificial
  Synthetically generated peptide
cggctccgccccgagtgggg

SEQ ID NO: 13025 - DNA, 20 bp, Artificial
  Synthetically generated peptide
gcggctccgccccgagtggg

SEQ ID NO: 13026 - DNA, 20 bp, Artificial
  Synthetically generated peptide
tgcggctccgccccgagtgg

SEQ ID NO: 13027 - DNA, 20 bp, Artificial
  Synthetically generated peptide
ctgcggctccgccccgagtg

SEQ ID NO: 13028 - DNA, 20 bp, Artificial
  Synthetically generated peptide
gctgcggctccgccccgagt

SEQ ID NO: 13029 - DNA, 20 bp, Artificial
  Synthetically generated peptide
ggctgcggctccgccccgag

SEQ ID NO: 13030 - DNA, 20 bp, Artificial
  Synthetically generated peptide
aggctgcggctccgccccga

SEQ ID NO: 13031 - DNA, 20 bp, Artificial
  Synthetically generated peptide
gaggctgcggctccgccccg

SEQ ID NO: 13032 - DNA, 20 bp, Artificial
  Synthetically generated peptide
cgaggctgcggctccgcccc

SEQ ID NO: 13033 - DNA, 20 bp, Artificial
  Synthetically generated peptide
gcgaggctgcggctccgccc

SEQ ID NO: 13034 - DNA, 20 bp, Artificial
  Synthetically generated peptide
cgcgaggctgcggctccgcc

SEQ ID NO: 13035 - DNA, 20 bp, Artificial
  Synthetically generated peptide
ccgcgaggctgcggctccgc

SEQ ID NO: 13036 - DNA, 20 bp, Artificial
  Synthetically generated peptide
cccgcgaggctgcggctccg

SEQ ID NO: 13037 - DNA, 20 bp, Artificial
  Synthetically generated peptide
ccccgcgaggctgcggctcc

SEQ ID NO: 13038 - DNA, 20 bp, Artificial
  Synthetically generated peptide
cccccgcgaggctgcggctc

SEQ ID NO: 13039 - DNA, 20 bp, Artificial
  Synthetically generated peptide
gcccccgcgaggctgcggct

SEQ ID NO: 13040 - DNA, 20 bp, Artificial
  Synthetically generated peptide
cgcccccgcgaggctgcggc

SEQ ID NO: 13041 - DNA, 20 bp, Artificial
  Synthetically generated peptide
ccgcccccgcgaggctgcgg

SEQ ID NO: 13042 - DNA, 20 bp, Artificial
  Synthetically generated peptide
cccgcccccgcgaggctgcg

SEQ ID NO: 13043 - DNA, 20 bp, Artificial
  Synthetically generated peptide
ccccgcccccgcgaggctgc

SEQ ID NO: 13044 - DNA, 20 bp, Artificial
  Synthetically generated peptide
gccccgcccccgcgaggctg

SEQ ID NO: 13045 - DNA, 20 bp, Artificial
  Synthetically generated peptide
ggccccgcccccgcgaggct

SEQ ID NO: 13046 - DNA, 20 bp, Artificial
  Synthetically generated peptide
aggccccgcccccgcgaggc

SEQ ID NO: 13047 - DNA, 20 bp, Artificial
  Synthetically generated peptide
caggccccgcccccgcgagg

SEQ ID NO: 13048 - DNA, 20 bp, Artificial
  Synthetically generated peptide
ccaggccccgcccccgcgag

SEQ ID NO: 13049 - DNA, 20 bp, Artificial
  Synthetically generated peptide
gccaggccccgcccccgcga

SEQ ID NO: 13050 - DNA, 20 bp, Artificial
  Synthetically generated peptide
cgccaggccccgcccccgcg

SEQ ID NO: 13051 - DNA, 20 bp, Artificial
  Synthetically generated peptide
gcgccaggccccgcccccgc

SEQ ID NO: 13052 - DNA, 20 bp, Artificial
  Synthetically generated peptide
ggcgccaggccccgcccccg

SEQ ID NO: 13053 - DNA, 20 bp, Artificial
  Synthetically generated peptide
cggcgccaggccccgccccc

SEQ ID NO: 13054 - DNA, 20 bp, Artificial
  Synthetically generated peptide
ccggcgccaggccccgcccc

SEQ ID NO: 13055 - DNA, 20 bp, Artificial
  Synthetically generated peptide
gccggcgccaggccccgccc

SEQ ID NO: 13056 - DNA, 20 bp, Artificial
  Synthetically generated peptide
cgccggcgccaggccccgcc

SEQ ID NO: 13057 - DNA, 20 bp, Artificial
  Synthetically generated peptide
ccgccggcgccaggccccgc

SEQ ID NO: 13058 - DNA, 20 bp, Artificial
  Synthetically generated peptide
accgccggcgccaggccccg

SEQ ID NO: 13059 - DNA, 20 bp, Artificial
  Synthetically generated peptide
caccgccggcgccaggcccc

SEQ ID NO: 13060 - DNA, 20 bp, Artificial
  Synthetically generated peptide
ccaccgccggcgccaggccc

SEQ ID NO: 13061 - DNA, 20 bp, Artificial
  Synthetically generated peptide
gccaccgccggcgccaggcc

SEQ ID NO: 13062 - DNA, 20 bp, Artificial
  Synthetically generated peptide
cgccaccgccggcgccaggc

SEQ ID NO: 13063 - DNA, 20 bp, Artificial
  Synthetically generated peptide
acgccaccgccggcgccagg

SEQ ID NO: 13064 - DNA, 20 bp, Artificial
  Synthetically generated peptide
gacgccaccgccggcgccag

SEQ ID NO: 13065 - DNA, 20 bp, Artificial
  Synthetically generated peptide
tgacgccaccgccggcgcca

SEQ ID NO: 13066 - DNA, 20 bp, Artificial
  Synthetically generated peptide
gtgacgccaccgccggcgcc

SEQ ID NO: 13067 - DNA, 20 bp, Artificial
  Synthetically generated peptide
tgtgacgccaccgccggcgc

SEQ ID NO: 13068 - DNA, 20 bp, Artificial
  Synthetically generated peptide
ttgtgacgccaccgccggcg

SEQ ID NO: 13069 - DNA, 20 bp, Artificial
  Synthetically generated peptide
tttgtgacgccaccgccggc

SEQ ID NO: 13070 - DNA, 20 bp, Artificial
  Synthetically generated peptide
ttttgtgacgccaccgccgg

SEQ ID NO: 13071 - DNA, 20 bp, Artificial
  Synthetically generated peptide
cttttgtgacgccaccgccg

SEQ ID NO: 13072 - DNA, 20 bp, Artificial
  Synthetically generated peptide
ccttttgtgacgccaccgcc

SEQ ID NO: 13073 - DNA, 20 bp, Artificial
  Synthetically generated peptide
gccttttgtgacgccaccgc

SEQ ID NO: 13074 - DNA, 20 bp, Artificial
  Synthetically generated peptide
cgccttttgtgacgccaccg

SEQ ID NO: 13075 - DNA, 20 bp, Artificial
  Synthetically generated peptide
ccgccttttgtgacgccacc

SEQ ID NO: 13076 - DNA, 20 bp, Artificial
  Synthetically generated peptide
cccgccttttgtgacgccac

SEQ ID NO: 13077 - DNA, 20 bp, Artificial
  Synthetically generated peptide
tcccgccttttgtgacgcca

SEQ ID NO: 13078 - DNA, 20 bp, Artificial
  Synthetically generated peptide
gtcccgccttttgtgacgcc

SEQ ID NO: 13079 - DNA, 20 bp, Artificial
  Synthetically generated peptide
ggtcccgccttttgtgacgc

SEQ ID NO: 13080 - DNA, 20 bp, Artificial
  Synthetically generated peptide
tggtcccgccttttgtgacg

SEQ ID NO: 13081 - DNA, 20 bp, Artificial
  Synthetically generated peptide
gtggtcccgccttttgtgac

SEQ ID NO: 13082 - DNA, 20 bp, Artificial
  Synthetically generated peptide
tgtggtcccgccttttgtga

SEQ ID NO: 13083 - DNA, 20 bp, Artificial
  Synthetically generated peptide
ctgtggtcccgccttttgtg

SEQ ID NO: 13084 - DNA, 20 bp, Artificial
  Synthetically generated peptide
actgtggtcccgccttttgt

SEQ ID NO: 13085 - DNA, 20 bp, Artificial
  Synthetically generated peptide
cactgtggtcccgccttttg

SEQ ID NO: 13086 - DNA, 20 bp, Artificial
  Synthetically generated peptide
ccactgtggtcccgcctttt

SEQ ID NO: 13087 - DNA, 20 bp, Artificial
  Synthetically generated peptide
accactgtggtcccgccttt

SEQ ID NO: 13088 - DNA, 20 bp, Artificial
  Synthetically generated peptide
caccactgtggtcccgcctt

SEQ ID NO: 13089 - DNA, 20 bp, Artificial
  Synthetically generated peptide
acaccactgtggtcccgcct

SEQ ID NO: 13090 - DNA, 20 bp, Artificial
  Synthetically generated peptide
gacaccactgtggtcccgcc

SEQ ID NO: 13091 - DNA, 20 bp, Artificial
  Synthetically generated peptide
ggacaccactgtggtcccgc

SEQ ID NO: 13092 - DNA, 20 bp, Artificial
  Synthetically generated peptide
cggacaccactgtggtcccg

SEQ ID NO: 13093 - DNA, 20 bp, Artificial
  Synthetically generated peptide
tcggacaccactgtggtccc

SEQ ID NO: 13094 - DNA, 20 bp, Artificial
  Synthetically generated peptide
ctcggacaccactgtggtcc

SEQ ID NO: 13095 - DNA, 20 bp, Artificial
  Synthetically generated peptide
tctcggacaccactgtggtc

SEQ ID NO: 13096 - DNA, 20 bp, Artificial
  Synthetically generated peptide
ttctcggacaccactgtggt

SEQ ID NO: 13097 - DNA, 20 bp, Artificial
  Synthetically generated peptide
cttctcggacaccactgtgg

SEQ ID NO: 13098 - DNA, 20 bp, Artificial
  Synthetically generated peptide
acttctcggacaccactgtg

SEQ ID NO: 13099 - DNA, 20 bp, Artificial
  Synthetically generated peptide
gacttctcggacaccactgt

SEQ ID NO: 13100 - DNA, 20 bp, Artificial
  Synthetically generated peptide
tgacttctcggacaccactg

SEQ ID NO: 13101 - DNA, 20 bp, Artificial
  Synthetically generated peptide
ctgacttctcggacaccact

SEQ ID NO: 13102 - DNA, 20 bp, Artificial
  Synthetically generated peptide
cctgacttctcggacaccac

SEQ ID NO: 13103 - DNA, 20 bp, Artificial
  Synthetically generated peptide
gcctgacttctcggacacca

SEQ ID NO: 13104 - DNA, 20 bp, Artificial
  Synthetically generated peptide
tgcctgacttctcggacacc

SEQ ID NO: 13105 - DNA, 20 bp, Artificial
  Synthetically generated peptide
gtgcctgacttctcggacac

SEQ ID NO: 13106 - DNA, 20 bp, Artificial
  Synthetically generated peptide
cgtgcctgacttctcggaca

SEQ ID NO: 13107 - DNA, 20 bp, Artificial
  Synthetically generated peptide
acgtgcctgacttctcggac

SEQ ID NO: 13108 - DNA, 20 bp, Artificial
  Synthetically generated peptide
tacgtgcctgacttctcgga

SEQ ID NO: 13109 - DNA, 20 bp, Artificial
  Synthetically generated peptide
ctacgtgcctgacttctcgg

SEQ ID NO: 13110 - DNA, 20 bp, Artificial
  Synthetically generated peptide
gctacgtgcctgacttctcg

SEQ ID NO: 13111 - DNA, 20 bp, Artificial
  Synthetically generated peptide
agctacgtgcctgacttctc

SEQ ID NO: 13112 - DNA, 20 bp, Artificial
  Synthetically generated peptide
gagctacgtgcctgacttct

SEQ ID NO: 13113 - DNA, 20 bp, Artificial
  Synthetically generated peptide
tgagctacgtgcctgacttc

SEQ ID NO: 13114 - DNA, 20 bp, Artificial
  Synthetically generated peptide
ctgagctacgtgcctgactt

SEQ ID NO: 13115 - DNA, 20 bp, Artificial
  Synthetically generated peptide
gctgagctacgtgcctgact

SEQ ID NO: 13116 - DNA, 20 bp, Artificial
  Synthetically generated peptide
cgctgagctacgtgcctgac

SEQ ID NO: 13117 - DNA, 20 bp, Artificial
  Synthetically generated peptide
ccgctgagctacgtgcctga

SEQ ID NO: 13118 - DNA, 20 bp, Artificial
  Synthetically generated peptide
gccgctgagctacgtgcctg

SEQ ID NO: 13119 - DNA, 20 bp, Artificial
  Synthetically generated peptide
cgccgctgagctacgtgcct

SEQ ID NO: 13120 - DNA, 20 bp, Artificial
  Synthetically generated peptide
ccgccgctgagctacgtgcc

SEQ ID NO: 13121 - DNA, 20 bp, Artificial
  Synthetically generated peptide
gccgccgctgagctacgtgc

SEQ ID NO: 13122 - DNA, 20 bp, Artificial
  Synthetically generated peptide
ggccgccgctgagctacgtg

SEQ ID NO: 13123 - DNA, 32 bp, Artificial
  Synthetically generated peptide
cggctagaaatcggcctgttccggcctcgcct

SEQ ID NO: 13124 - DNA, 20 bp, Artificial
  Synthetically generated peptide
ggctagaaatcggcctgttc

SEQ ID NO: 13125 - DNA, 20 bp, Artificial
  Synthetically generated peptide
gctagaaatcggcctgttcc

SEQ ID NO: 13126 - DNA, 20 bp, Artificial
  Synthetically generated peptide
ctagaaatcggcctgttccg

SEQ ID NO: 13127 - DNA, 20 bp, Artificial
  Synthetically generated peptide
tagaaatcggcctgttccgg

SEQ ID NO: 13128 - DNA, 20 bp, Artificial
  Synthetically generated peptide
agaaatcggcctgttccggc

SEQ ID NO: 13129 - DNA, 20 bp, Artificial
  Synthetically generated peptide
gaaatcggcctgttccggcc

SEQ ID NO: 13130 - DNA, 20 bp, Artificial
  Synthetically generated peptide
aaatcggcctgttccggcct

SEQ ID NO: 13131 - DNA, 20 bp, Artificial
  Synthetically generated peptide
aatcggcctgttccggcctc

SEQ ID NO: 13132 - DNA, 20 bp, Artificial
  Synthetically generated peptide
atcggcctgttccggcctcg

SEQ ID NO: 13133 - DNA, 20 bp, Artificial
  Synthetically generated peptide
tcggcctgttccggcctcgc

SEQ ID NO: 13134 - DNA, 20 bp, Artificial
  Synthetically generated peptide
cggcctgttccggcctcgcc

SEQ ID NO: 13135 - DNA, 20 bp, Artificial
  Synthetically generated peptide
ggcctgttccggcctcgcct

SEQ ID NO: 13136 - DNA, 20 bp, Artificial
  Synthetically generated peptide
gcctgttccggcctcgcctc

SEQ ID NO: 13137 - DNA, 20 bp, Artificial
  Synthetically generated peptide
cctgttccggcctcgcctcg

SEQ ID NO: 13138 - DNA, 20 bp, Artificial
  Synthetically generated peptide
ctgttccggcctcgcctcgg

SEQ ID NO: 13139 - DNA, 20 bp, Artificial
  Synthetically generated peptide
tgttccggcctcgcctcggg

SEQ ID NO: 13140 - DNA, 20 bp, Artificial
  Synthetically generated peptide
gttccggcctcgcctcgggt

SEQ ID NO: 13141 - DNA, 20 bp, Artificial
  Synthetically generated peptide
ttccggcctcgcctcgggtc

SEQ ID NO: 13142 - DNA, 20 bp, Artificial
  Synthetically generated peptide
tccggcctcgcctcgggtct

SEQ ID NO: 13143 - DNA, 20 bp, Artificial
  Synthetically generated peptide
ccggcctcgcctcgggtctt

SEQ ID NO: 13144 - DNA, 20 bp, Artificial
  Synthetically generated peptide
cggcctcgcctcgggtcttt

SEQ ID NO: 13145 - DNA, 20 bp, Artificial
  Synthetically generated peptide
ggcctcgcctcgggtctttc

SEQ ID NO: 13146 - DNA, 20 bp, Artificial
  Synthetically generated peptide
gcctcgcctcgggtctttct

SEQ ID NO: 13147 - DNA, 20 bp, Artificial
  Synthetically generated peptide
cctcgcctcgggtctttctt

SEQ ID NO: 13148 - DNA, 20 bp, Artificial
  Synthetically generated peptide
ctcgcctcgggtctttctta

SEQ ID NO: 13149 - DNA, 20 bp, Artificial
  Synthetically generated peptide
tcgcctcgggtctttcttag

SEQ ID NO: 13150 - DNA, 20 bp, Artificial
  Synthetically generated peptide
cgcctcgggtctttcttagt

SEQ ID NO: 13151 - DNA, 20 bp, Artificial
  Synthetically generated peptide
gcctcgggtctttcttagtc

SEQ ID NO: 13152 - DNA, 20 bp, Artificial
  Synthetically generated peptide
cctcgggtctttcttagtcc

SEQ ID NO: 13153 - DNA, 20 bp, Artificial
  Synthetically generated peptide
ctcgggtctttcttagtcct

SEQ ID NO: 13154 - DNA, 20 bp, Artificial
  Synthetically generated peptide
tcgggtctttcttagtcctt

SEQ ID NO: 13155 - DNA, 20 bp, Artificial
  Synthetically generated peptide
cgggtctttcttagtccttt

SEQ ID NO: 13156 - DNA, 20 bp, Artificial
  Synthetically generated peptide
gcggctagaaatcggcctgt

SEQ ID NO: 13157 - DNA, 20 bp, Artificial
  Synthetically generated peptide
ggcggctagaaatcggcctg

SEQ ID NO: 13158 - DNA, 20 bp, Artificial
  Synthetically generated peptide
tggcggctagaaatcggcct

SEQ ID NO: 13159 - DNA, 20 bp, Artificial
  Synthetically generated peptide
ttggcggctagaaatcggcc

SEQ ID NO: 13160 - DNA, 20 bp, Artificial
  Synthetically generated peptide
cttggcggctagaaatcggc

SEQ ID NO: 13161 - DNA, 20 bp, Artificial
  Synthetically generated peptide
acttggcggctagaaatcgg

SEQ ID NO: 13162 - DNA, 20 bp, Artificial
  Synthetically generated peptide
cacttggcggctagaaatcg

SEQ ID NO: 13163 - DNA, 20 bp, Artificial
  Synthetically generated peptide
ccacttggcggctagaaatc

SEQ ID NO: 13164 - DNA, 20 bp, Artificial
  Synthetically generated peptide
tccacttggcggctagaaat

SEQ ID NO: 13165 - DNA, 20 bp, Artificial
  Synthetically generated peptide
ctccacttggcggctagaaa

SEQ ID NO: 13166 - DNA, 20 bp, Artificial
  Synthetically generated peptide
tctccacttggcggctagaa

SEQ ID NO: 13167 - DNA, 20 bp, Artificial
  Synthetically generated peptide
ttctccacttggcggctaga

SEQ ID NO: 13168 - DNA, 20 bp, Artificial
  Synthetically generated peptide
gttctccacttggcggctag

SEQ ID NO: 13169 - DNA, 20 bp, Artificial
  Synthetically generated peptide
tgttctccacttggcggcta

SEQ ID NO: 13170 - DNA, 20 bp, Artificial
  Synthetically generated peptide
ctgttctccacttggcggct

SEQ ID NO: 13171 - DNA, 20 bp, Artificial
  Synthetically generated peptide
cctgttctccacttggcggc

SEQ ID NO: 13172 - DNA, 20 bp, Artificial
  Synthetically generated peptide
acctgttctccacttggcgg

SEQ ID NO: 13173 - DNA, 20 bp, Artificial
  Synthetically generated peptide
aacctgttctccacttggcg

SEQ ID NO: 13174 - DNA, 28 bp, Artificial
  Synthetically generated peptide
cgggggtggggatgcggcggtgaacccg

SEQ ID NO: 13175 - DNA, 31 bp, Artificial
  Synthetically generated peptide
cgcggcaggtgagaggggagctgcccctgcg

SEQ ID NO: 13176 - DNA, 27 bp, Artificial
  Synthetically generated peptide
cgcgtgcacgtgtgtccacatgagtgc

SEQ ID NO: 13177 - DNA, 20 bp, Artificial
  Synthetically generated peptide
gcgtgcacgtgtgtccacat

SEQ ID NO: 13178 - DNA, 20 bp, Artificial
  Synthetically generated peptide
cgtgcacgtgtgtccacatg

SEQ ID NO: 13179 - DNA, 20 bp, Artificial
  Synthetically generated peptide
gtgcacgtgtgtccacatga

SEQ ID NO: 13180 - DNA, 20 bp, Artificial
  Synthetically generated peptide
tgcacgtgtgtccacatgag

SEQ ID NO: 13181 - DNA, 20 bp, Artificial
  Synthetically generated peptide
gcacgtgtgtccacatgagt

SEQ ID NO: 13182 - DNA, 20 bp, Artificial
  Synthetically generated peptide
cacgtgtgtccacatgagtg

SEQ ID NO: 13183 - DNA, 20 bp, Artificial
  Synthetically generated peptide
acgtgtgtccacatgagtgc

SEQ ID NO: 13184 - DNA, 20 bp, Artificial
  Synthetically generated peptide
cgtgtgtccacatgagtgct

SEQ ID NO: 13185 - DNA, 20 bp, Artificial
  Synthetically generated peptide
gcgcgtgcacgtgtgtccac

SEQ ID NO: 13186 - DNA, 20 bp, Artificial
  Synthetically generated peptide
tgcgcgtgcacgtgtgtcca

SEQ ID NO: 13187 - DNA, 20 bp, Artificial
  Synthetically generated peptide
gtgcgcgtgcacgtgtgtcc

SEQ ID NO: 13188 - DNA, 20 bp, Artificial
  Synthetically generated peptide
tgtgcgcgtgcacgtgtgtc

SEQ ID NO: 13189 - DNA, 20 bp, Artificial
  Synthetically generated peptide
gtgtgcgcgtgcacgtgtgt

SEQ ID NO: 13190 - DNA, 20 bp, Artificial
  Synthetically generated peptide
tgtgtgcgcgtgcacgtgtg

SEQ ID NO: 13191 - DNA, 20 bp, Artificial
  Synthetically generated peptide
gtgtgtgcgcgtgcacgtgt

SEQ ID NO: 13192 - DNA, 20 bp, Artificial
  Synthetically generated peptide
tgtgtgtgcgcgtgcacgtg

SEQ ID NO: 13193 - DNA, 20 bp, Artificial
  Synthetically generated peptide
atgtgtgtgcgcgtgcacgt

SEQ ID NO: 13194 - DNA, 20 bp, Artificial
  Synthetically generated peptide
catgtgtgtgcgcgtgcacg

SEQ ID NO: 13195 - DNA, 20 bp, Artificial
  Synthetically generated peptide
ccatgtgtgtgcgcgtgcac

SEQ ID NO: 13196 - DNA, 20 bp, Artificial
  Synthetically generated peptide
tccatgtgtgtgcgcgtgca

SEQ ID NO: 13197 - DNA, 20 bp, Artificial
  Synthetically generated peptide
gtccatgtgtgtgcgcgtgc

SEQ ID NO: 13198 - DNA, 20 bp, Artificial
  Synthetically generated peptide
tgtccatgtgtgtgcgcgtg

SEQ ID NO: 13199 - DNA, 20 bp, Artificial
  Synthetically generated peptide
gtgtccatgtgtgtgcgcgt

SEQ ID NO: 13200 - DNA, 20 bp, Artificial
  Synthetically generated peptide
tgtgtccatgtgtgtgcgcg

SEQ ID NO: 13201 - DNA, 20 bp, Artificial
  Synthetically generated peptide
gtgtgtccatgtgtgtgcgc

SEQ ID NO: 13202 - DNA, 20 bp, Artificial
  Synthetically generated peptide
tgtgtgtccatgtgtgtgcg

SEQ ID NO: 13203 - DNA, 26 bp, Artificial
  Synthetically generated peptide
cgccaccgccggcgccaggccccgcc

SEQ ID NO: 13204 - DNA, 20 bp, Artificial
  Synthetically generated peptide
gccaccgccggcgccaggcc

SEQ ID NO: 13205 - DNA, 20 bp, Artificial
  Synthetically generated peptide
ccaccgccggcgccaggccc

SEQ ID NO: 13206 - DNA, 20 bp, Artificial
  Synthetically generated peptide
caccgccggcgccaggcccc

SEQ ID NO: 13207 - DNA, 20 bp, Artificial
  Synthetically generated peptide
accgccggcgccaggccccg

SEQ ID NO: 13208 - DNA, 20 bp, Artificial
  Synthetically generated peptide
ccgccggcgccaggccccgc

SEQ ID NO: 13209 - DNA, 20 bp, Artificial
  Synthetically generated peptide
cgccggcgccaggccccgcc

SEQ ID NO: 13210 - DNA, 20 bp, Artificial
  Synthetically generated peptide
gccggcgccaggccccgccc

SEQ ID NO: 13211 - DNA, 20 bp, Artificial
  Synthetically generated peptide
ccggcgccaggccccgcccc

SEQ ID NO: 13212 - DNA, 20 bp, Artificial
  Synthetically generated peptide
cggcgccaggccccgccccc

SEQ ID NO: 13213 - DNA, 20 bp, Artificial
  Synthetically generated peptide
ggcgccaggccccgcccccg

SEQ ID NO: 13214 - DNA, 20 bp, Artificial
  Synthetically generated peptide
gcgccaggccccgcccccgc

SEQ ID NO: 13215 - DNA, 20 bp, Artificial
  Synthetically generated peptide
cgccaggccccgcccccgcg

SEQ ID NO: 13216 - DNA, 20 bp, Artificial
  Synthetically generated peptide
gccaggccccgcccccgcga

SEQ ID NO: 13217 - DNA, 20 bp, Artificial
  Synthetically generated peptide
ccaggccccgcccccgcgag

SEQ ID NO: 13218 - DNA, 20 bp, Artificial
  Synthetically generated peptide
caggccccgcccccgcgagg

SEQ ID NO: 13219 - DNA, 20 bp, Artificial
  Synthetically generated peptide
aggccccgcccccgcgaggc

SEQ ID NO: 13220 - DNA, 20 bp, Artificial
  Synthetically generated peptide
ggccccgcccccgcgaggct

SEQ ID NO: 13221 - DNA, 20 bp, Artificial
  Synthetically generated peptide
gccccgcccccgcgaggctg

SEQ ID NO: 13222 - DNA, 20 bp, Artificial
  Synthetically generated peptide
ccccgcccccgcgaggctgc

SEQ ID NO: 13223 - DNA, 20 bp, Artificial
  Synthetically generated peptide
cccgcccccgcgaggctgcg

SEQ ID NO: 13224 - DNA, 20 bp, Artificial
  Synthetically generated peptide
ccgcccccgcgaggctgcgg

SEQ ID NO: 13225 - DNA, 20 bp, Artificial
  Synthetically generated peptide
cgcccccgcgaggctgcggc

SEQ ID NO: 13226 - DNA, 20 bp, Artificial
  Synthetically generated peptide
gcccccgcgaggctgcggct

SEQ ID NO: 13227 - DNA, 20 bp, Artificial
  Synthetically generated peptide
cccccgcgaggctgcggctc

SEQ ID NO: 13228 - DNA, 20 bp, Artificial
  Synthetically generated peptide
ccccgcgaggctgcggctcc

SEQ ID NO: 13229 - DNA, 20 bp, Artificial
  Synthetically generated peptide
cccgcgaggctgcggctccg

SEQ ID NO: 13230 - DNA, 20 bp, Artificial
  Synthetically generated peptide
ccgcgaggctgcggctccgc

SEQ ID NO: 13231 - DNA, 20 bp, Artificial
  Synthetically generated peptide
cgcgaggctgcggctccgcc

SEQ ID NO: 13232 - DNA, 20 bp, Artificial
  Synthetically generated peptide
gcgaggctgcggctccgccc

SEQ ID NO: 13233 - DNA, 20 bp, Artificial
  Synthetically generated peptide
cgaggctgcggctccgcccc

SEQ ID NO: 13234 - DNA, 20 bp, Artificial
  Synthetically generated peptide
gaggctgcggctccgccccg

SEQ ID NO: 13235 - DNA, 20 bp, Artificial
  Synthetically generated peptide
aggctgcggctccgccccga

SEQ ID NO: 13236 - DNA, 20 bp, Artificial
  Synthetically generated peptide
ggctgcggctccgccccgag

SEQ ID NO: 13237 - DNA, 20 bp, Artificial
  Synthetically generated peptide
gctgcggctccgccccgagt

SEQ ID NO: 13238 - DNA, 20 bp, Artificial
  Synthetically generated peptide
ctgcggctccgccccgagtg

SEQ ID NO: 13239 - DNA, 20 bp, Artificial
  Synthetically generated peptide
tgcggctccgccccgagtgg

SEQ ID NO: 13240 - DNA, 20 bp, Artificial
  Synthetically generated peptide
gcggctccgccccgagtggg

SEQ ID NO: 13241 - DNA, 20 bp, Artificial
  Synthetically generated peptide
cggctccgccccgagtgggg

SEQ ID NO: 13242 - DNA, 20 bp, Artificial
  Synthetically generated peptide
ggctccgccccgagtgggga

SEQ ID NO: 13243 - DNA, 20 bp, Artificial
  Synthetically generated peptide
gctccgccccgagtggggaa

SEQ ID NO: 13244 - DNA, 20 bp, Artificial
  Synthetically generated peptide
ctccgccccgagtggggaag

SEQ ID NO: 13245 - DNA, 20 bp, Artificial
  Synthetically generated peptide
tccgccccgagtggggaagt

SEQ ID NO: 13246 - DNA, 20 bp, Artificial
  Synthetically generated peptide
ccgccccgagtggggaagtc

SEQ ID NO: 13247 - DNA, 20 bp, Artificial
  Synthetically generated peptide
cgccccgagtggggaagtca

SEQ ID NO: 13248 - DNA, 20 bp, Artificial
  Synthetically generated peptide
gccccgagtggggaagtcac

SEQ ID NO: 13249 - DNA, 20 bp, Artificial
  Synthetically generated peptide
ccccgagtggggaagtcacc

SEQ ID NO: 13250 - DNA, 20 bp, Artificial
  Synthetically generated peptide
cccgagtggggaagtcaccg

SEQ ID NO: 13251 - DNA, 20 bp, Artificial
  Synthetically generated peptide
ccgagtggggaagtcaccgc

SEQ ID NO: 13252 - DNA, 20 bp, Artificial
  Synthetically generated peptide
cgagtggggaagtcaccgcc

SEQ ID NO: 13253 - DNA, 20 bp, Artificial
  Synthetically generated peptide
gagtggggaagtcaccgcct

SEQ ID NO: 13254 - DNA, 20 bp, Artificial
  Synthetically generated peptide
agtggggaagtcaccgcctg

SEQ ID NO: 13255 - DNA, 20 bp, Artificial
  Synthetically generated peptide
gtggggaagtcaccgcctgc

SEQ ID NO: 13256 - DNA, 20 bp, Artificial
  Synthetically generated peptide
tggggaagtcaccgcctgcc

SEQ ID NO: 13257 - DNA, 20 bp, Artificial
  Synthetically generated peptide
ggggaagtcaccgcctgcct

SEQ ID NO: 13258 - DNA, 20 bp, Artificial
  Synthetically generated peptide
gggaagtcaccgcctgcctc

SEQ ID NO: 13259 - DNA, 20 bp, Artificial
  Synthetically generated peptide
ggaagtcaccgcctgcctcg

SEQ ID NO: 13260 - DNA, 20 bp, Artificial
  Synthetically generated peptide
gaagtcaccgcctgcctcgg

SEQ ID NO: 13261 - DNA, 20 bp, Artificial
  Synthetically generated peptide
aagtcaccgcctgcctcggc

SEQ ID NO: 13262 - DNA, 20 bp, Artificial
  Synthetically generated peptide
agtcaccgcctgcctcggct

SEQ ID NO: 13263 - DNA, 20 bp, Artificial
  Synthetically generated peptide
gtcaccgcctgcctcggctc

SEQ ID NO: 13264 - DNA, 20 bp, Artificial
  Synthetically generated peptide
tcaccgcctgcctcggctcg

SEQ ID NO: 13265 - DNA, 20 bp, Artificial
  Synthetically generated peptide
caccgcctgcctcggctcga

SEQ ID NO: 13266 - DNA, 20 bp, Artificial
  Synthetically generated peptide
accgcctgcctcggctcgac

SEQ ID NO: 13267 - DNA, 20 bp, Artificial
  Synthetically generated peptide
ccgcctgcctcggctcgacc

SEQ ID NO: 13268 - DNA, 20 bp, Artificial
  Synthetically generated peptide
cgcctgcctcggctcgaccc

SEQ ID NO: 13269 - DNA, 20 bp, Artificial
  Synthetically generated peptide
gcctgcctcggctcgacccc

SEQ ID NO: 13270 - DNA, 20 bp, Artificial
  Synthetically generated peptide
cctgcctcggctcgaccccc

SEQ ID NO: 13271 - DNA, 20 bp, Artificial
  Synthetically generated peptide
ctgcctcggctcgacccccg

SEQ ID NO: 13272 - DNA, 20 bp, Artificial
  Synthetically generated peptide
tgcctcggctcgacccccgc

SEQ ID NO: 13273 - DNA, 20 bp, Artificial
  Synthetically generated peptide
gcctcggctcgacccccgca

SEQ ID NO: 13274 - DNA, 20 bp, Artificial
  Synthetically generated peptide
cctcggctcgacccccgcag

SEQ ID NO: 13275 - DNA, 20 bp, Artificial
  Synthetically generated peptide
ctcggctcgacccccgcagg

SEQ ID NO: 13276 - DNA, 20 bp, Artificial
  Synthetically generated peptide
tcggctcgacccccgcaggg

SEQ ID NO: 13277 - DNA, 20 bp, Artificial
  Synthetically generated peptide
cggctcgacccccgcagggc

SEQ ID NO: 13278 - DNA, 20 bp, Artificial
  Synthetically generated peptide
ggctcgacccccgcagggca

SEQ ID NO: 13279 - DNA, 20 bp, Artificial
  Synthetically generated peptide
gctcgacccccgcagggcag

SEQ ID NO: 13280 - DNA, 20 bp, Artificial
  Synthetically generated peptide
ctcgacccccgcagggcagg

SEQ ID NO: 13281 - DNA, 20 bp, Artificial
  Synthetically generated peptide
tcgacccccgcagggcagga

SEQ ID NO: 13282 - DNA, 20 bp, Artificial
  Synthetically generated peptide
cgacccccgcagggcaggac

SEQ ID NO: 13283 - DNA, 20 bp, Artificial
  Synthetically generated peptide
gacccccgcagggcaggacc

SEQ ID NO: 13284 - DNA, 20 bp, Artificial
  Synthetically generated peptide
acccccgcagggcaggaccc

SEQ ID NO: 13285 - DNA, 20 bp, Artificial
  Synthetically generated peptide
cccccgcagggcaggaccct

SEQ ID NO: 13286 - DNA, 20 bp, Artificial
  Synthetically generated peptide
ccccgcagggcaggaccctg

SEQ ID NO: 13287 - DNA, 20 bp, Artificial
  Synthetically generated peptide
cccgcagggcaggaccctgg

SEQ ID NO: 13288 - DNA, 20 bp, Artificial
  Synthetically generated peptide
ccgcagggcaggaccctggg

SEQ ID NO: 13289 - DNA, 20 bp, Artificial
  Synthetically generated peptide
cgcagggcaggaccctgggc

SEQ ID NO: 13290 - DNA, 20 bp, Artificial
  Synthetically generated peptide
gcagggcaggaccctgggcg

SEQ ID NO: 13291 - DNA, 20 bp, Artificial
  Synthetically generated peptide
cagggcaggaccctgggcga

SEQ ID NO: 13292 - DNA, 20 bp, Artificial
  Synthetically generated peptide
agggcaggaccctgggcgac

SEQ ID NO: 13293 - DNA, 20 bp, Artificial
  Synthetically generated peptide
gggcaggaccctgggcgact

SEQ ID NO: 13294 - DNA, 20 bp, Artificial
  Synthetically generated peptide
ggcaggaccctgggcgactc

SEQ ID NO: 13295 - DNA, 20 bp, Artificial
  Synthetically generated peptide
gcaggaccctgggcgactcc

SEQ ID NO: 13296 - DNA, 20 bp, Artificial
  Synthetically generated peptide
caggaccctgggcgactccg

SEQ ID NO: 13297 - DNA, 20 bp, Artificial
  Synthetically generated peptide
aggaccctgggcgactccgc

SEQ ID NO: 13298 - DNA, 20 bp, Artificial
  Synthetically generated peptide
ggaccctgggcgactccgcc

SEQ ID NO: 13299 - DNA, 20 bp, Artificial
  Synthetically generated peptide
gaccctgggcgactccgccc

SEQ ID NO: 13300 - DNA, 20 bp, Artificial
  Synthetically generated peptide
accctgggcgactccgcccg

SEQ ID NO: 13301 - DNA, 20 bp, Artificial
  Synthetically generated peptide
ccctgggcgactccgcccgt

SEQ ID NO: 13302 - DNA, 20 bp, Artificial
  Synthetically generated peptide
cctgggcgactccgcccgtt

SEQ ID NO: 13303 - DNA, 20 bp, Artificial
  Synthetically generated peptide
ctgggcgactccgcccgttc

SEQ ID NO: 13304 - DNA, 20 bp, Artificial
  Synthetically generated peptide
tgggcgactccgcccgttcc

SEQ ID NO: 13305 - DNA, 20 bp, Artificial
  Synthetically generated peptide
gggcgactccgcccgttcct

SEQ ID NO: 13306 - DNA, 20 bp, Artificial
  Synthetically generated peptide
ggcgactccgcccgttcctc

SEQ ID NO: 13307 - DNA, 20 bp, Artificial
  Synthetically generated peptide
gcgactccgcccgttcctcc

SEQ ID NO: 13308 - DNA, 20 bp, Artificial
  Synthetically generated peptide
cgactccgcccgttcctcca

SEQ ID NO: 13309 - DNA, 20 bp, Artificial
  Synthetically generated peptide
gactccgcccgttcctccag

SEQ ID NO: 13310 - DNA, 20 bp, Artificial
  Synthetically generated peptide
actccgcccgttcctccagc

SEQ ID NO: 13311 - DNA, 20 bp, Artificial
  Synthetically generated peptide
ctccgcccgttcctccagca

SEQ ID NO: 13312 - DNA, 20 bp, Artificial
  Synthetically generated peptide
tccgcccgttcctccagcaa

SEQ ID NO: 13313 - DNA, 20 bp, Artificial
  Synthetically generated peptide
ccgcccgttcctccagcaac

SEQ ID NO: 13314 - DNA, 20 bp, Artificial
  Synthetically generated peptide
cgcccgttcctccagcaacc

SEQ ID NO: 13315 - DNA, 20 bp, Artificial
  Synthetically generated peptide
gcccgttcctccagcaaccg

SEQ ID NO: 13316 - DNA, 20 bp, Artificial
  Synthetically generated peptide
cccgttcctccagcaaccgc

SEQ ID NO: 13317 - DNA, 20 bp, Artificial
  Synthetically generated peptide
ccgttcctccagcaaccgcc

SEQ ID NO: 13318 - DNA, 20 bp, Artificial
  Synthetically generated peptide
cgttcctccagcaaccgccg

SEQ ID NO: 13319 - DNA, 20 bp, Artificial
  Synthetically generated peptide
gttcctccagcaaccgccgc

SEQ ID NO: 13320 - DNA, 20 bp, Artificial
  Synthetically generated peptide
ttcctccagcaaccgccgct

SEQ ID NO: 13321 - DNA, 20 bp, Artificial
  Synthetically generated peptide
tcctccagcaaccgccgcta

SEQ ID NO: 13322 - DNA, 20 bp, Artificial
  Synthetically generated peptide
cctccagcaaccgccgctaa

SEQ ID NO: 13323 - DNA, 20 bp, Artificial
  Synthetically generated peptide
ctccagcaaccgccgctaag

SEQ ID NO: 13324 - DNA, 20 bp, Artificial
  Synthetically generated peptide
tccagcaaccgccgctaagc

SEQ ID NO: 13325 - DNA, 20 bp, Artificial
  Synthetically generated peptide
ccagcaaccgccgctaagcc

SEQ ID NO: 13326 - DNA, 20 bp, Artificial
  Synthetically generated peptide
cagcaaccgccgctaagccc

SEQ ID NO: 13327 - DNA, 20 bp, Artificial
  Synthetically generated peptide
agcaaccgccgctaagcccg

SEQ ID NO: 13328 - DNA, 20 bp, Artificial
  Synthetically generated peptide
gcaaccgccgctaagcccgg

SEQ ID NO: 13329 - DNA, 20 bp, Artificial
  Synthetically generated peptide
caaccgccgctaagcccggc

SEQ ID NO: 13330 - DNA, 20 bp, Artificial
  Synthetically generated peptide
aaccgccgctaagcccggcg

SEQ ID NO: 13331 - DNA, 20 bp, Artificial
  Synthetically generated peptide
accgccgctaagcccggcgc

SEQ ID NO: 13332 - DNA, 20 bp, Artificial
  Synthetically generated peptide
ccgccgctaagcccggcgca

SEQ ID NO: 13333 - DNA, 20 bp, Artificial
  Synthetically generated peptide
cgccgctaagcccggcgcac

SEQ ID NO: 13334 - DNA, 20 bp, Artificial
  Synthetically generated peptide
gccgctaagcccggcgcacc

SEQ ID NO: 13335 - DNA, 20 bp, Artificial
  Synthetically generated peptide
ccgctaagcccggcgcaccg

SEQ ID NO: 13336 - DNA, 20 bp, Artificial
  Synthetically generated peptide
cgctaagcccggcgcaccgc

SEQ ID NO: 13337 - DNA, 20 bp, Artificial
  Synthetically generated peptide
gctaagcccggcgcaccgct

SEQ ID NO: 13338 - DNA, 20 bp, Artificial
  Synthetically generated peptide
ctaagcccggcgcaccgctc

SEQ ID NO: 13339 - DNA, 20 bp, Artificial
  Synthetically generated peptide
taagcccggcgcaccgctcc

SEQ ID NO: 13340 - DNA, 20 bp, Artificial
  Synthetically generated peptide
aagcccggcgcaccgctcca

SEQ ID NO: 13341 - DNA, 20 bp, Artificial
  Synthetically generated peptide
agcccggcgcaccgctccaa

SEQ ID NO: 13342 - DNA, 20 bp, Artificial
  Synthetically generated peptide
gcccggcgcaccgctccaac

SEQ ID NO: 13343 - DNA, 20 bp, Artificial
  Synthetically generated peptide
cccggcgcaccgctccaacc

SEQ ID NO: 13344 - DNA, 20 bp, Artificial
  Synthetically generated peptide
ccggcgcaccgctccaacct

SEQ ID NO: 13345 - DNA, 20 bp, Artificial
  Synthetically generated peptide
cggcgcaccgctccaacctg

SEQ ID NO: 13346 - DNA, 20 bp, Artificial
  Synthetically generated peptide
ggcgcaccgctccaacctgt

SEQ ID NO: 13347 - DNA, 20 bp, Artificial
  Synthetically generated peptide
gcgcaccgctccaacctgtt

SEQ ID NO: 13348 - DNA, 20 bp, Artificial
  Synthetically generated peptide
cgcaccgctccaacctgttc

SEQ ID NO: 13349 - DNA, 20 bp, Artificial
  Synthetically generated peptide
gcaccgctccaacctgttct

SEQ ID NO: 13350 - DNA, 20 bp, Artificial
  Synthetically generated peptide
caccgctccaacctgttctc

SEQ ID NO: 13351 - DNA, 20 bp, Artificial
  Synthetically generated peptide
accgctccaacctgttctcc

SEQ ID NO: 13352 - DNA, 20 bp, Artificial
  Synthetically generated peptide
ccgctccaacctgttctcca

SEQ ID NO: 13353 - DNA, 20 bp, Artificial
  Synthetically generated peptide
cgctccaacctgttctccac

SEQ ID NO: 13354 - DNA, 20 bp, Artificial
  Synthetically generated peptide
acgccaccgccggcgccagg

SEQ ID NO: 13355 - DNA, 20 bp, Artificial
  Synthetically generated peptide
gacgccaccgccggcgccag

SEQ ID NO: 13356 - DNA, 20 bp, Artificial
  Synthetically generated peptide
tgacgccaccgccggcgcca

SEQ ID NO: 13357 - DNA, 20 bp, Artificial
  Synthetically generated peptide
gtgacgccaccgccggcgcc

SEQ ID NO: 13358 - DNA, 20 bp, Artificial
  Synthetically generated peptide
tgtgacgccaccgccggcgc

SEQ ID NO: 13359 - DNA, 20 bp, Artificial
  Synthetically generated peptide
ttgtgacgccaccgccggcg

SEQ ID NO: 13360 - DNA, 20 bp, Artificial
  Synthetically generated peptide
tttgtgacgccaccgccggc

SEQ ID NO: 13361 - DNA, 20 bp, Artificial
  Synthetically generated peptide
ttttgtgacgccaccgccgg

SEQ ID NO: 13362 - DNA, 20 bp, Artificial
  Synthetically generated peptide
cttttgtgacgccaccgccg

SEQ ID NO: 13363 - DNA, 20 bp, Artificial
  Synthetically generated peptide
ccttttgtgacgccaccgcc

SEQ ID NO: 13364 - DNA, 20 bp, Artificial
  Synthetically generated peptide
gccttttgtgacgccaccgc

SEQ ID NO: 13365 - DNA, 20 bp, Artificial
  Synthetically generated peptide
cgccttttgtgacgccaccg

SEQ ID NO: 13366 - DNA, 20 bp, Artificial
  Synthetically generated peptide
ccgccttttgtgacgccacc

SEQ ID NO: 13367 - DNA, 20 bp, Artificial
  Synthetically generated peptide
cccgccttttgtgacgccac

SEQ ID NO: 13368 - DNA, 20 bp, Artificial
  Synthetically generated peptide
tcccgccttttgtgacgcca

SEQ ID NO: 13369 - DNA, 20 bp, Artificial
  Synthetically generated peptide
gtcccgccttttgtgacgcc

SEQ ID NO: 13370 - DNA, 20 bp, Artificial
  Synthetically generated peptide
ggtcccgccttttgtgacgc

SEQ ID NO: 13371 - DNA, 20 bp, Artificial
  Synthetically generated peptide
tggtcccgccttttgtgacg

SEQ ID NO: 13372 - DNA, 20 bp, Artificial
  Synthetically generated peptide
gtggtcccgccttttgtgac

SEQ ID NO: 13373 - DNA, 20 bp, Artificial
  Synthetically generated peptide
tgtggtcccgccttttgtga

SEQ ID NO: 13374 - DNA, 20 bp, Artificial
  Synthetically generated peptide
ctgtggtcccgccttttgtg

SEQ ID NO: 13375 - DNA, 20 bp, Artificial
  Synthetically generated peptide
actgtggtcccgccttttgt

SEQ ID NO: 13376 - DNA, 20 bp, Artificial
  Synthetically generated peptide
cactgtggtcccgccttttg

SEQ ID NO: 13377 - DNA, 20 bp, Artificial
  Synthetically generated peptide
ccactgtggtcccgcctttt

SEQ ID NO: 13378 - DNA, 20 bp, Artificial
  Synthetically generated peptide
accactgtggtcccgccttt

SEQ ID NO: 13379 - DNA, 20 bp, Artificial
  Synthetically generated peptide
caccactgtggtcccgcctt

SEQ ID NO: 13380 - DNA, 20 bp, Artificial
  Synthetically generated peptide
acaccactgtggtcccgcct

SEQ ID NO: 13381 - DNA, 20 bp, Artificial
  Synthetically generated peptide
gacaccactgtggtcccgcc

SEQ ID NO: 13382 - DNA, 20 bp, Artificial
  Synthetically generated peptide
ggacaccactgtggtcccgc

SEQ ID NO: 13383 - DNA, 20 bp, Artificial
  Synthetically generated peptide
cggacaccactgtggtcccg

SEQ ID NO: 13384 - DNA, 20 bp, Artificial
  Synthetically generated peptide
tcggacaccactgtggtccc

SEQ ID NO: 13385 - DNA, 20 bp, Artificial
  Synthetically generated peptide
ctcggacaccactgtggtcc

SEQ ID NO: 13386 - DNA, 20 bp, Artificial
  Synthetically generated peptide
tctcggacaccactgtggtc

SEQ ID NO: 13387 - DNA, 20 bp, Artificial
  Synthetically generated peptide
ttctcggacaccactgtggt

SEQ ID NO: 13388 - DNA, 20 bp, Artificial
  Synthetically generated peptide
cttctcggacaccactgtgg

SEQ ID NO: 13389 - DNA, 20 bp, Artificial
  Synthetically generated peptide
acttctcggacaccactgtg

SEQ ID NO: 13390 - DNA, 20 bp, Artificial
  Synthetically generated peptide
gacttctcggacaccactgt

SEQ ID NO: 13391 - DNA, 20 bp, Artificial
  Synthetically generated peptide
tgacttctcggacaccactg

SEQ ID NO: 13392 - DNA, 20 bp, Artificial
  Synthetically generated peptide
ctgacttctcggacaccact

SEQ ID NO: 13393 - DNA, 20 bp, Artificial
  Synthetically generated peptide
cctgacttctcggacaccac

SEQ ID NO: 13394 - DNA, 20 bp, Artificial
  Synthetically generated peptide
gcctgacttctcggacacca

SEQ ID NO: 13395 - DNA, 20 bp, Artificial
  Synthetically generated peptide
tgcctgacttctcggacacc

SEQ ID NO: 13396 - DNA, 20 bp, Artificial
  Synthetically generated peptide
gtgcctgacttctcggacac

SEQ ID NO: 13397 - DNA, 20 bp, Artificial
  Synthetically generated peptide
cgtgcctgacttctcggaca

SEQ ID NO: 13398 - DNA, 20 bp, Artificial
  Synthetically generated peptide
acgtgcctgacttctcggac

SEQ ID NO: 13399 - DNA, 20 bp, Artificial
  Synthetically generated peptide
tacgtgcctgacttctcgga

SEQ ID NO: 13400 - DNA, 20 bp, Artificial
  Synthetically generated peptide
ctacgtgcctgacttctcgg

SEQ ID NO: 13401 - DNA, 20 bp, Artificial
  Synthetically generated peptide
gctacgtgcctgacttctcg

SEQ ID NO: 13402 - DNA, 20 bp, Artificial
  Synthetically generated peptide
agctacgtgcctgacttctc

SEQ ID NO: 13403 - DNA, 20 bp, Artificial
  Synthetically generated peptide
gagctacgtgcctgacttct

SEQ ID NO: 13404 - DNA, 20 bp, Artificial
  Synthetically generated peptide
tgagctacgtgcctgacttc

SEQ ID NO: 13405 - DNA, 20 bp, Artificial
  Synthetically generated peptide
ctgagctacgtgcctgactt

SEQ ID NO: 13406 - DNA, 20 bp, Artificial
  Synthetically generated peptide
gctgagctacgtgcctgact

SEQ ID NO: 13407 - DNA, 20 bp, Artificial
  Synthetically generated peptide
cgctgagctacgtgcctgac

SEQ ID NO: 13408 - DNA, 20 bp, Artificial
  Synthetically generated peptide
ccgctgagctacgtgcctga

SEQ ID NO: 13409 - DNA, 20 bp, Artificial
  Synthetically generated peptide
gccgctgagctacgtgcctg

SEQ ID NO: 13410 - DNA, 20 bp, Artificial
  Synthetically generated peptide
cgccgctgagctacgtgcct

SEQ ID NO: 13411 - DNA, 20 bp, Artificial
  Synthetically generated peptide
ccgccgctgagctacgtgcc

SEQ ID NO: 13412 - DNA, 20 bp, Artificial
  Synthetically generated peptide
gccgccgctgagctacgtgc

SEQ ID NO: 13413 - DNA, 20 bp, Artificial
  Synthetically generated peptide
ggccgccgctgagctacgtg

SEQ ID NO: 13414 - DNA, 26 bp, Artificial
  Synthetically generated peptide
cgcggcaggtgagaggggagctgccc

SEQ ID NO: 13415 - DNA, 25 bp, Artificial
  Synthetically generated peptide
cgggaagaggatgcgctgacctggc

SEQ ID NO: 13416 - DNA, 27 bp, Artificial
  Synthetically generated peptide
cacgccctggggaggaggctcgagagg

SEQ ID NO: 13417 - DNA, 20 bp, Artificial
  Synthetically generated peptide
acgccctggggaggaggctc

SEQ ID NO: 13418 - DNA, 20 bp, Artificial
  Synthetically generated peptide
cgccctggggaggaggctcg

SEQ ID NO: 13419 - DNA, 20 bp, Artificial
  Synthetically generated peptide
gccctggggaggaggctcga

SEQ ID NO: 13420 - DNA, 20 bp, Artificial
  Synthetically generated peptide
ccctggggaggaggctcgag

SEQ ID NO: 13421 - DNA, 20 bp, Artificial
  Synthetically generated peptide
tcacgccctggggaggaggc

SEQ ID NO: 13422 - DNA, 20 bp, Artificial
  Synthetically generated peptide
ctcacgccctggggaggagg

SEQ ID NO: 13423 - DNA, 20 bp, Artificial
  Synthetically generated peptide
actcacgccctggggaggag

SEQ ID NO: 13424 - DNA, 20 bp, Artificial
  Synthetically generated peptide
aactcacgccctggggagga

SEQ ID NO: 13425 - DNA, 20 bp, Artificial
  Synthetically generated peptide
gaactcacgccctggggagg

SEQ ID NO: 13426 - DNA, 20 bp, Artificial
  Synthetically generated peptide
agaactcacgccctggggag

SEQ ID NO: 13427 - DNA, 20 bp, Artificial
  Synthetically generated peptide
cagaactcacgccctgggga

SEQ ID NO: 13428 - DNA, 20 bp, Artificial
  Synthetically generated peptide
tcagaactcacgccctgggg

SEQ ID NO: 13429 - DNA, 20 bp, Artificial
  Synthetically generated peptide
gtcagaactcacgccctggg

SEQ ID NO: 13430 - DNA, 20 bp, Artificial
  Synthetically generated peptide
ggtcagaactcacgccctgg

SEQ ID NO: 13431 - DNA, 20 bp, Artificial
  Synthetically generated peptide
gggtcagaactcacgccctg

SEQ ID NO: 13432 - DNA, 20 bp, Artificial
  Synthetically generated peptide
ggggtcagaactcacgccct

SEQ ID NO: 13433 - DNA, 20 bp, Artificial
  Synthetically generated peptide
tggggtcagaactcacgccc

SEQ ID NO: 13434 - DNA, 20 bp, Artificial
  Synthetically generated peptide
ctggggtcagaactcacgcc

SEQ ID NO: 13435 - DNA, 20 bp, Artificial
  Synthetically generated peptide
gctggggtcagaactcacgc

SEQ ID NO: 13436 - DNA, 20 bp, Artificial
  Synthetically generated peptide
agctggggtcagaactcacg

SEQ ID NO: 13437 - DNA, 25 bp, Artificial
  Synthetically generated peptide
cgagaggggccgagcctctgaaaaa

SEQ ID NO: 13438 - DNA, 20 bp, Artificial
  Synthetically generated peptide
gagaggggccgagcctctga

SEQ ID NO: 13439 - DNA, 20 bp, Artificial
  Synthetically generated peptide
agaggggccgagcctctgaa

SEQ ID NO: 13440 - DNA, 20 bp, Artificial
  Synthetically generated peptide
gaggggccgagcctctgaaa

SEQ ID NO: 13441 - DNA, 20 bp, Artificial
  Synthetically generated peptide
aggggccgagcctctgaaaa

SEQ ID NO: 13442 - DNA, 20 bp, Artificial
  Synthetically generated peptide
ggggccgagcctctgaaaaa

SEQ ID NO: 13443 - DNA, 20 bp, Artificial
  Synthetically generated peptide
gggccgagcctctgaaaaag

SEQ ID NO: 13444 - DNA, 20 bp, Artificial
  Synthetically generated peptide
ggccgagcctctgaaaaaga

SEQ ID NO: 13445 - DNA, 20 bp, Artificial
  Synthetically generated peptide
gccgagcctctgaaaaagaa

SEQ ID NO: 13446 - DNA, 20 bp, Artificial
  Synthetically generated peptide
ccgagcctctgaaaaagaat

SEQ ID NO: 13447 - DNA, 20 bp, Artificial
  Synthetically generated peptide
cgagcctctgaaaaagaatg

SEQ ID NO: 13448 - DNA, 20 bp, Artificial
  Synthetically generated peptide
tcgagaggggccgagcctct

SEQ ID NO: 13449 - DNA, 20 bp, Artificial
  Synthetically generated peptide
ctcgagaggggccgagcctc

SEQ ID NO: 13450 - DNA, 20 bp, Artificial
  Synthetically generated peptide
gctcgagaggggccgagcct

SEQ ID NO: 13451 - DNA, 20 bp, Artificial
  Synthetically generated peptide
ggctcgagaggggccgagcc

SEQ ID NO: 13452 - DNA, 25 bp, Artificial
  Synthetically generated peptide
cgtctggtccacagtccgatgtcca

SEQ ID NO: 13453 - DNA, 20 bp, Artificial
  Synthetically generated peptide
gtctggtccacagtccgatg

SEQ ID NO: 13454 - DNA, 20 bp, Artificial
  Synthetically generated peptide
tctggtccacagtccgatgt

SEQ ID NO: 13455 - DNA, 20 bp, Artificial
  Synthetically generated peptide
ctggtccacagtccgatgtc

SEQ ID NO: 13456 - DNA, 20 bp, Artificial
  Synthetically generated peptide
tggtccacagtccgatgtcc

SEQ ID NO: 13457 - DNA, 20 bp, Artificial
  Synthetically generated peptide
ggtccacagtccgatgtcca

SEQ ID NO: 13458 - DNA, 20 bp, Artificial
  Synthetically generated peptide
gtccacagtccgatgtccag

SEQ ID NO: 13459 - DNA, 20 bp, Artificial
  Synthetically generated peptide
tccacagtccgatgtccagg

SEQ ID NO: 13460 - DNA, 20 bp, Artificial
  Synthetically generated peptide
ccacagtccgatgtccaggc

SEQ ID NO: 13461 - DNA, 20 bp, Artificial
  Synthetically generated peptide
cacagtccgatgtccaggcc

SEQ ID NO: 13462 - DNA, 20 bp, Artificial
  Synthetically generated peptide
acagtccgatgtccaggcca

SEQ ID NO: 13463 - DNA, 20 bp, Artificial
  Synthetically generated peptide
cagtccgatgtccaggccac

SEQ ID NO: 13464 - DNA, 20 bp, Artificial
  Synthetically generated peptide
agtccgatgtccaggccaca

SEQ ID NO: 13465 - DNA, 20 bp, Artificial
  Synthetically generated peptide
gtccgatgtccaggccacaa

SEQ ID NO: 13466 - DNA, 20 bp, Artificial
  Synthetically generated peptide
tccgatgtccaggccacaaa

SEQ ID NO: 13467 - DNA, 20 bp, Artificial
  Synthetically generated peptide
ccgatgtccaggccacaaac

SEQ ID NO: 13468 - DNA, 20 bp, Artificial
  Synthetically generated peptide
cgatgtccaggccacaaact

SEQ ID NO: 13469 - DNA, 20 bp, Artificial
  Synthetically generated peptide
tcgtctggtccacagtccga

SEQ ID NO: 13470 - DNA, 20 bp, Artificial
  Synthetically generated peptide
gtcgtctggtccacagtccg

SEQ ID NO: 13471 - DNA, 20 bp, Artificial
  Synthetically generated peptide
agtcgtctggtccacagtcc

SEQ ID NO: 13472 - DNA, 20 bp, Artificial
  Synthetically generated peptide
gagtcgtctggtccacagtc

SEQ ID NO: 13473 - DNA, 20 bp, Artificial
  Synthetically generated peptide
ggagtcgtctggtccacagt

SEQ ID NO: 13474 - DNA, 20 bp, Artificial
  Synthetically generated peptide
aggagtcgtctggtccacag

SEQ ID NO: 13475 - DNA, 20 bp, Artificial
  Synthetically generated peptide
gaggagtcgtctggtccaca

SEQ ID NO: 13476 - DNA, 20 bp, Artificial
  Synthetically generated peptide
ggaggagtcgtctggtccac

SEQ ID NO: 13477 - DNA, 20 bp, Artificial
  Synthetically generated peptide
gggaggagtcgtctggtcca

SEQ ID NO: 13478 - DNA, 20 bp, Artificial
  Synthetically generated peptide
cgggaggagtcgtctggtcc

SEQ ID NO: 13479 - DNA, 20 bp, Artificial
  Synthetically generated peptide
tcgggaggagtcgtctggtc

SEQ ID NO: 13480 - DNA, 20 bp, Artificial
  Synthetically generated peptide
atcgggaggagtcgtctggt

SEQ ID NO: 13481 - DNA, 20 bp, Artificial
  Synthetically generated peptide
aatcgggaggagtcgtctgg

SEQ ID NO: 13482 - DNA, 20 bp, Artificial
  Synthetically generated peptide
aaatcgggaggagtcgtctg

SEQ ID NO: 13483 - DNA, 20 bp, Artificial
  Synthetically generated peptide
gaaatcgggaggagtcgtct

SEQ ID NO: 13484 - DNA, 27 bp, Artificial
  Synthetically generated peptide
cgagccaggcagggcccctcgcaagtg

SEQ ID NO: 13485 - DNA, 20 bp, Artificial
  Synthetically generated peptide
gagccaggcagggcccctcg

SEQ ID NO: 13486 - DNA, 20 bp, Artificial
  Synthetically generated peptide
agccaggcagggcccctcgc

SEQ ID NO: 13487 - DNA, 20 bp, Artificial
  Synthetically generated peptide
gccaggcagggcccctcgca

SEQ ID NO: 13488 - DNA, 20 bp, Artificial
  Synthetically generated peptide
ccaggcagggcccctcgcaa

SEQ ID NO: 13489 - DNA, 20 bp, Artificial
  Synthetically generated peptide
caggcagggcccctcgcaag

SEQ ID NO: 13490 - DNA, 20 bp, Artificial
  Synthetically generated peptide
aggcagggcccctcgcaagt

SEQ ID NO: 13491 - DNA, 20 bp, Artificial
  Synthetically generated peptide
ggcagggcccctcgcaagtg

SEQ ID NO: 13492 - DNA, 20 bp, Artificial
  Synthetically generated peptide
gcagggcccctcgcaagtga

SEQ ID NO: 13493 - DNA, 20 bp, Artificial
  Synthetically generated peptide
cagggcccctcgcaagtgag

SEQ ID NO: 13494 - DNA, 20 bp, Artificial
  Synthetically generated peptide
agggcccctcgcaagtgagt

SEQ ID NO: 13495 - DNA, 20 bp, Artificial
  Synthetically generated peptide
gggcccctcgcaagtgagtc

SEQ ID NO: 13496 - DNA, 20 bp, Artificial
  Synthetically generated peptide
ggcccctcgcaagtgagtca

SEQ ID NO: 13497 - DNA, 20 bp, Artificial
  Synthetically generated peptide
gcccctcgcaagtgagtcag

SEQ ID NO: 13498 - DNA, 20 bp, Artificial
  Synthetically generated peptide
cccctcgcaagtgagtcagt

SEQ ID NO: 13499 - DNA, 20 bp, Artificial
  Synthetically generated peptide
ccctcgcaagtgagtcagtg

SEQ ID NO: 13500 - DNA, 20 bp, Artificial
  Synthetically generated peptide
cctcgcaagtgagtcagtgc

SEQ ID NO: 13501 - DNA, 20 bp, Artificial
  Synthetically generated peptide
ctcgcaagtgagtcagtgct

SEQ ID NO: 13502 - DNA, 20 bp, Artificial
  Synthetically generated peptide
tcgcaagtgagtcagtgctg

SEQ ID NO: 13503 - DNA, 20 bp, Artificial
  Synthetically generated peptide
cgcaagtgagtcagtgctgg

SEQ ID NO: 13504 - DNA, 20 bp, Artificial
  Synthetically generated peptide
ccgagccaggcagggcccct

SEQ ID NO: 13505 - DNA, 20 bp, Artificial
  Synthetically generated peptide
cccgagccaggcagggcccc

SEQ ID NO: 13506 - DNA, 20 bp, Artificial
  Synthetically generated peptide
ccccgagccaggcagggccc

SEQ ID NO: 13507 - DNA, 20 bp, Artificial
  Synthetically generated peptide
cccccgagccaggcagggcc

SEQ ID NO: 13508 - DNA, 20 bp, Artificial
  Synthetically generated peptide
tcccccgagccaggcagggc

SEQ ID NO: 13509 - DNA, 20 bp, Artificial
  Synthetically generated peptide
ctcccccgagccaggcaggg

SEQ ID NO: 13510 - DNA, 20 bp, Artificial
  Synthetically generated peptide
cctcccccgagccaggcagg

SEQ ID NO: 13511 - DNA, 20 bp, Artificial
  Synthetically generated peptide
gcctcccccgagccaggcag

SEQ ID NO: 13512 - DNA, 20 bp, Artificial
  Synthetically generated peptide
tgcctcccccgagccaggca

SEQ ID NO: 13513 - DNA, 20 bp, Artificial
  Synthetically generated peptide
ctgcctcccccgagccaggc

SEQ ID NO: 13514 - DNA, 20 bp, Artificial
  Synthetically generated peptide
cctgcctcccccgagccagg

SEQ ID NO: 13515 - DNA, 20 bp, Artificial
  Synthetically generated peptide
ccctgcctcccccgagccag

SEQ ID NO: 13516 - DNA, 20 bp, Artificial
  Synthetically generated peptide
gccctgcctcccccgagcca

SEQ ID NO: 13517 - DNA, 20 bp, Artificial
  Synthetically generated peptide
agccctgcctcccccgagcc

SEQ ID NO: 13518 - DNA, 20 bp, Artificial
  Synthetically generated peptide
cagccctgcctcccccgagc

SEQ ID NO: 13519 - DNA, 20 bp, Artificial
  Synthetically generated peptide
tcagccctgcctcccccgag

SEQ ID NO: 13520 - DNA, 20 bp, Artificial
  Synthetically generated peptide
ttcagccctgcctcccccga

SEQ ID NO: 13521 - DNA, 20 bp, Artificial
  Synthetically generated peptide
cttcagccctgcctcccccg

SEQ ID NO: 13522 - DNA, 25 bp, Artificial
  Synthetically generated peptide
gacggatatgagtccagaagttgcg

SEQ ID NO: 13523 - DNA, 20 bp, Artificial
  Synthetically generated peptide
acggatatgagtccagaagt

SEQ ID NO: 13524 - DNA, 20 bp, Artificial
  Synthetically generated peptide
cggatatgagtccagaagtt

SEQ ID NO: 13525 - DNA, 20 bp, Artificial
  Synthetically generated peptide
tgacggatatgagtccagaa

SEQ ID NO: 13526 - DNA, 20 bp, Artificial
  Synthetically generated peptide
ctgacggatatgagtccaga

SEQ ID NO: 13527 - DNA, 20 bp, Artificial
  Synthetically generated peptide
tctgacggatatgagtccag

SEQ ID NO: 13528 - DNA, 20 bp, Artificial
  Synthetically generated peptide
gtctgacggatatgagtcca

SEQ ID NO: 13529 - DNA, 20 bp, Artificial
  Synthetically generated peptide
tgtctgacggatatgagtcc

SEQ ID NO: 13530 - DNA, 20 bp, Artificial
  Synthetically generated peptide
atgtctgacggatatgagtc

SEQ ID NO: 13531 - DNA, 20 bp, Artificial
  Synthetically generated peptide
gatgtctgacggatatgagt

SEQ ID NO: 13532 - DNA, 20 bp, Artificial
  Synthetically generated peptide
tgatgtctgacggatatgag

SEQ ID NO: 13533 - DNA, 20 bp, Artificial
  Synthetically generated peptide
gtgatgtctgacggatatga

SEQ ID NO: 13534 - DNA, 20 bp, Artificial
  Synthetically generated peptide
agtgatgtctgacggatatg

SEQ ID NO: 13535 - DNA, 27 bp, Artificial
  Synthetically generated peptide
tagctgcgtgcagtggcgcgcgcctgt

SEQ ID NO: 13536 - DNA, 20 bp, Artificial
  Synthetically generated peptide
agctgcgtgcagtggcgcgc

SEQ ID NO: 13537 - DNA, 20 bp, Artificial
  Synthetically generated peptide
gctgcgtgcagtggcgcgcg

SEQ ID NO: 13538 - DNA, 20 bp, Artificial
  Synthetically generated peptide
ctgcgtgcagtggcgcgcgc

SEQ ID NO: 13539 - DNA, 20 bp, Artificial
  Synthetically generated peptide
tgcgtgcagtggcgcgcgcc

SEQ ID NO: 13540 - DNA, 20 bp, Artificial
  Synthetically generated peptide
gcgtgcagtggcgcgcgcct

SEQ ID NO: 13541 - DNA, 20 bp, Artificial
  Synthetically generated peptide
cgtgcagtggcgcgcgcctg

SEQ ID NO: 13542 - DNA, 20 bp, Artificial
  Synthetically generated peptide
gtgcagtggcgcgcgcctgt

SEQ ID NO: 13543 - DNA, 20 bp, Artificial
  Synthetically generated peptide
tgcagtggcgcgcgcctgta

SEQ ID NO: 13544 - DNA, 20 bp, Artificial
  Synthetically generated peptide
gcagtggcgcgcgcctgtag

SEQ ID NO: 13545 - DNA, 20 bp, Artificial
  Synthetically generated peptide
cagtggcgcgcgcctgtagt

SEQ ID NO: 13546 - DNA, 20 bp, Artificial
  Synthetically generated peptide
agtggcgcgcgcctgtagtc

SEQ ID NO: 13547 - DNA, 20 bp, Artificial
  Synthetically generated peptide
gtggcgcgcgcctgtagtcc

SEQ ID NO: 13548 - DNA, 20 bp, Artificial
  Synthetically generated peptide
tggcgcgcgcctgtagtccc

SEQ ID NO: 13549 - DNA, 20 bp, Artificial
  Synthetically generated peptide
ggcgcgcgcctgtagtccca

SEQ ID NO: 13550 - DNA, 20 bp, Artificial
  Synthetically generated peptide
gcgcgcgcctgtagtcccag

SEQ ID NO: 13551 - DNA, 20 bp, Artificial
  Synthetically generated peptide
cgcgcgcctgtagtcccagc

SEQ ID NO: 13552 - DNA, 20 bp, Artificial
  Synthetically generated peptide
gcgcgcctgtagtcccagct

SEQ ID NO: 13553 - DNA, 20 bp, Artificial
  Synthetically generated peptide
cgcgcctgtagtcccagcta

SEQ ID NO: 13554 - DNA, 20 bp, Artificial
  Synthetically generated peptide
gcgcctgtagtcccagctac

SEQ ID NO: 13555 - DNA, 20 bp, Artificial
  Synthetically generated peptide
cgcctgtagtcccagctact

SEQ ID NO: 13556 - DNA, 20 bp, Artificial
  Synthetically generated peptide
ttagctgcgtgcagtggcgc

SEQ ID NO: 13557 - DNA, 20 bp, Artificial
  Synthetically generated peptide
attagctgcgtgcagtggcg

SEQ ID NO: 13558 - DNA, 20 bp, Artificial
  Synthetically generated peptide
aattagctgcgtgcagtggc

SEQ ID NO: 13559 - DNA, 20 bp, Artificial
  Synthetically generated peptide
aaattagctgcgtgcagtgg

SEQ ID NO: 13560 - DNA, 20 bp, Artificial
  Synthetically generated peptide
aaaattagctgcgtgcagtg

SEQ ID NO: 13561 - DNA, 28 bp, Artificial
  Synthetically generated peptide
ccgcctcgccagctcccgagcgcgagtt

SEQ ID NO: 13562 - DNA, 20 bp, Artificial
  Synthetically generated peptide
cgcctcgccagctcccgagc

SEQ ID NO: 13563 - DNA, 20 bp, Artificial
  Synthetically generated peptide
gcctcgccagctcccgagcg

SEQ ID NO: 13564 - DNA, 20 bp, Artificial
  Synthetically generated peptide
cctcgccagctcccgagcgc

SEQ ID NO: 13565 - DNA, 20 bp, Artificial
  Synthetically generated peptide
ctcgccagctcccgagcgcg

SEQ ID NO: 13566 - DNA, 20 bp, Artificial
  Synthetically generated peptide
tcgccagctcccgagcgcga

SEQ ID NO: 13567 - DNA, 20 bp, Artificial
  Synthetically generated peptide
cgccagctcccgagcgcgag

SEQ ID NO: 13568 - DNA, 20 bp, Artificial
  Synthetically generated peptide
gccagctcccgagcgcgagt

SEQ ID NO: 13569 - DNA, 20 bp, Artificial
  Synthetically generated peptide
ccagctcccgagcgcgagtt

SEQ ID NO: 13570 - DNA, 20 bp, Artificial
  Synthetically generated peptide
cagctcccgagcgcgagttg

SEQ ID NO: 13571 - DNA, 20 bp, Artificial
  Synthetically generated peptide
agctcccgagcgcgagttgg

SEQ ID NO: 13572 - DNA, 20 bp, Artificial
  Synthetically generated peptide
gctcccgagcgcgagttgga

SEQ ID NO: 13573 - DNA, 20 bp, Artificial
  Synthetically generated peptide
ctcccgagcgcgagttggag

SEQ ID NO: 13574 - DNA, 20 bp, Artificial
  Synthetically generated peptide
tcccgagcgcgagttggagg

SEQ ID NO: 13575 - DNA, 20 bp, Artificial
  Synthetically generated peptide
cccgagcgcgagttggagga

SEQ ID NO: 13576 - DNA, 20 bp, Artificial
  Synthetically generated peptide
gccgcctcgccagctcccga

SEQ ID NO: 13577 - DNA, 20 bp, Artificial
  Synthetically generated peptide
cgccgcctcgccagctcccg

SEQ ID NO: 13578 - DNA, 20 bp, Artificial
  Synthetically generated peptide
ccgccgcctcgccagctccc

SEQ ID NO: 13579 - DNA, 20 bp, Artificial
  Synthetically generated peptide
gccgccgcctcgccagctcc

SEQ ID NO: 13580 - DNA, 20 bp, Artificial
  Synthetically generated peptide
cgccgccgcctcgccagctc

SEQ ID NO: 13581 - DNA, 20 bp, Artificial
  Synthetically generated peptide
ccgccgccgcctcgccagct

SEQ ID NO: 13582 - DNA, 20 bp, Artificial
  Synthetically generated peptide
gccgccgccgcctcgccagc

SEQ ID NO: 13583 - DNA, 20 bp, Artificial
  Synthetically generated peptide
agccgccgccgcctcgccag

SEQ ID NO: 13584 - DNA, 20 bp, Artificial
  Synthetically generated peptide
gagccgccgccgcctcgcca

SEQ ID NO: 13585 - DNA, 20 bp, Artificial
  Synthetically generated peptide
ggagccgccgccgcctcgcc

SEQ ID NO: 13586 - DNA, 20 bp, Artificial
  Synthetically generated peptide
aggagccgccgccgcctcgc

SEQ ID NO: 13587 - DNA, 20 bp, Artificial
  Synthetically generated peptide
gaggagccgccgccgcctcg

SEQ ID NO: 13588 - DNA, 20 bp, Artificial
  Synthetically generated peptide
tgaggagccgccgccgcctc

SEQ ID NO: 13589 - DNA, 20 bp, Artificial
  Synthetically generated peptide
ctgaggagccgccgccgcct

SEQ ID NO: 13590 - DNA, 20 bp, Artificial
  Synthetically generated peptide
actgaggagccgccgccgcc

SEQ ID NO: 13591 - DNA, 20 bp, Artificial
  Synthetically generated peptide
cactgaggagccgccgccgc

SEQ ID NO: 13592 - DNA, 20 bp, Artificial
  Synthetically generated peptide
tcactgaggagccgccgccg

SEQ ID NO: 13593 - DNA, 20 bp, Artificial
  Synthetically generated peptide
ctcactgaggagccgccgcc

SEQ ID NO: 13594 - DNA, 20 bp, Artificial
  Synthetically generated peptide
actcactgaggagccgccgc

SEQ ID NO: 13595 - DNA, 20 bp, Artificial
  Synthetically generated peptide
gactcactgaggagccgccg

SEQ ID NO: 13596 - DNA, 20 bp, Artificial
  Synthetically generated peptide
ggactcactgaggagccgcc

SEQ ID NO: 13597 - DNA, 20 bp, Artificial
  Synthetically generated peptide
gggactcactgaggagccgc

SEQ ID NO: 13598 - DNA, 20 bp, Artificial
  Synthetically generated peptide
cgggactcactgaggagccg

SEQ ID NO: 13599 - DNA, 20 bp, Artificial
  Synthetically generated peptide
ccgggactcactgaggagcc

SEQ ID NO: 13600 - DNA, 20 bp, Artificial
  Synthetically generated peptide
cccgggactcactgaggagc

SEQ ID NO: 13601 - DNA, 20 bp, Artificial
  Synthetically generated peptide
tcccgggactcactgaggag

SEQ ID NO: 13602 - DNA, 20 bp, Artificial
  Synthetically generated peptide
ctcccgggactcactgagga

SEQ ID NO: 13603 - DNA, 20 bp, Artificial
  Synthetically generated peptide
cctcccgggactcactgagg

SEQ ID NO: 13604 - DNA, 20 bp, Artificial
  Synthetically generated peptide
ccctcccgggactcactgag

SEQ ID NO: 13605 - DNA, 20 bp, Artificial
  Synthetically generated peptide
tccctcccgggactcactga

SEQ ID NO: 13606 - DNA, 20 bp, Artificial
  Synthetically generated peptide
gtccctcccgggactcactg

SEQ ID NO: 13607 - DNA, 20 bp, Artificial
  Synthetically generated peptide
tgtccctcccgggactcact

SEQ ID NO: 13608 - DNA, 20 bp, Artificial
  Synthetically generated peptide
ctgtccctcccgggactcac

SEQ ID NO: 13609 - DNA, 20 bp, Artificial
  Synthetically generated peptide
cctgtccctcccgggactca

SEQ ID NO: 13610 - DNA, 20 bp, Artificial
  Synthetically generated peptide
gcctgtccctcccgggactc

SEQ ID NO: 13611 - DNA, 20 bp, Artificial
  Synthetically generated peptide
ggcctgtccctcccgggact

SEQ ID NO: 13612 - DNA, 20 bp, Artificial
  Synthetically generated peptide
gggcctgtccctcccgggac

SEQ ID NO: 13613 - DNA, 20 bp, Artificial
  Synthetically generated peptide
cgggcctgtccctcccggga

SEQ ID NO: 13614 - DNA, 20 bp, Artificial
  Synthetically generated peptide
ccgggcctgtccctcccggg

SEQ ID NO: 13615 - DNA, 20 bp, Artificial
  Synthetically generated peptide
cccgggcctgtccctcccgg

SEQ ID NO: 13616 - DNA, 20 bp, Artificial
  Synthetically generated peptide
ccccgggcctgtccctcccg

SEQ ID NO: 13617 - DNA, 20 bp, Artificial
  Synthetically generated peptide
gccccgggcctgtccctccc

SEQ ID NO: 13618 - DNA, 20 bp, Artificial
  Synthetically generated peptide
cgccccgggcctgtccctcc

SEQ ID NO: 13619 - DNA, 20 bp, Artificial
  Synthetically generated peptide
tcgccccgggcctgtccctc

SEQ ID NO: 13620 - DNA, 20 bp, Artificial
  Synthetically generated peptide
ttcgccccgggcctgtccct

SEQ ID NO: 13621 - DNA, 20 bp, Artificial
  Synthetically generated peptide
cttcgccccgggcctgtccc

SEQ ID NO: 13622 - DNA, 20 bp, Artificial
  Synthetically generated peptide
ccttcgccccgggcctgtcc

SEQ ID NO: 13623 - DNA, 20 bp, Artificial
  Synthetically generated peptide
gccttcgccccgggcctgtc

SEQ ID NO: 13624 - DNA, 20 bp, Artificial
  Synthetically generated peptide
cgccttcgccccgggcctgt

SEQ ID NO: 13625 - DNA, 20 bp, Artificial
  Synthetically generated peptide
ccgccttcgccccgggcctg

SEQ ID NO: 13626 - DNA, 20 bp, Artificial
  Synthetically generated peptide
gccgccttcgccccgggcct

SEQ ID NO: 13627 - DNA, 20 bp, Artificial
  Synthetically generated peptide
cgccgccttcgccccgggcc

SEQ ID NO: 13628 - DNA, 20 bp, Artificial
  Synthetically generated peptide
tcgccgccttcgccccgggc

SEQ ID NO: 13629 - DNA, 20 bp, Artificial
  Synthetically generated peptide
ctcgccgccttcgccccggg

SEQ ID NO: 13630 - DNA, 20 bp, Artificial
  Synthetically generated peptide
cctcgccgccttcgccccgg

SEQ ID NO: 13631 - DNA, 20 bp, Artificial
  Synthetically generated peptide
gcctcgccgccttcgccccg

SEQ ID NO: 13632 - DNA, 20 bp, Artificial
  Synthetically generated peptide
ggcctcgccgccttcgcccc

SEQ ID NO: 13633 - DNA, 20 bp, Artificial
  Synthetically generated peptide
gggcctcgccgccttcgccc

SEQ ID NO: 13634 - DNA, 20 bp, Artificial
  Synthetically generated peptide
cgggcctcgccgccttcgcc

SEQ ID NO: 13635 - DNA, 20 bp, Artificial
  Synthetically generated peptide
gcgggcctcgccgccttcgc

SEQ ID NO: 13636 - DNA, 20 bp, Artificial
  Synthetically generated peptide
cgcgggcctcgccgccttcg

SEQ ID NO: 13637 - DNA, 20 bp, Artificial
  Synthetically generated peptide
ccgcgggcctcgccgccttc

SEQ ID NO: 13638 - DNA, 20 bp, Artificial
  Synthetically generated peptide
accgcgggcctcgccgcctt

SEQ ID NO: 13639 - DNA, 20 bp, Artificial
  Synthetically generated peptide
aaccgcgggcctcgccgcct

SEQ ID NO: 13640 - DNA, 20 bp, Artificial
  Synthetically generated peptide
aaaccgcgggcctcgccgcc

SEQ ID NO: 13641 - DNA, 20 bp, Artificial
  Synthetically generated peptide
gaaaccgcgggcctcgccgc

SEQ ID NO: 13642 - DNA, 20 bp, Artificial
  Synthetically generated peptide
ggaaaccgcgggcctcgccg

SEQ ID NO: 13643 - DNA, 20 bp, Artificial
  Synthetically generated peptide
aggaaaccgcgggcctcgcc

SEQ ID NO: 13644 - DNA, 20 bp, Artificial
  Synthetically generated peptide
caggaaaccgcgggcctcgc

SEQ ID NO: 13645 - DNA, 20 bp, Artificial
  Synthetically generated peptide
ccaggaaaccgcgggcctcg

SEQ ID NO: 13646 - DNA, 20 bp, Artificial
  Synthetically generated peptide
tccaggaaaccgcgggcctc

SEQ ID NO: 13647 - DNA, 20 bp, Artificial
  Synthetically generated peptide
gtccaggaaaccgcgggcct

SEQ ID NO: 13648 - DNA, 20 bp, Artificial
  Synthetically generated peptide
agtccaggaaaccgcgggcc

SEQ ID NO: 13649 - DNA, 20 bp, Artificial
  Synthetically generated peptide
cagtccaggaaaccgcgggc

SEQ ID NO: 13650 - DNA, 20 bp, Artificial
  Synthetically generated peptide
ccagtccaggaaaccgcggg

SEQ ID NO: 13651 - DNA, 20 bp, Artificial
  Synthetically generated peptide
cccagtccaggaaaccgcgg

SEQ ID NO: 13652 - DNA, 20 bp, Artificial
  Synthetically generated peptide
ccccagtccaggaaaccgcg

SEQ ID NO: 13653 - DNA, 20 bp, Artificial
  Synthetically generated peptide
tccccagtccaggaaaccgc

SEQ ID NO: 13654 - DNA, 20 bp, Artificial
  Synthetically generated peptide
ctccccagtccaggaaaccg

SEQ ID NO: 13655 - DNA, 34 bp, Artificial
  Synthetically generated peptide
cgcctcctcccaggtgtgggctggctgcagaccg

SEQ ID NO: 13656 - DNA, 20 bp, Artificial
  Synthetically generated peptide
ccgcctcctcccaggtgtgg

SEQ ID NO: 13657 - DNA, 20 bp, Artificial
  Synthetically generated peptide
gccgcctcctcccaggtgtg

SEQ ID NO: 13658 - DNA, 20 bp, Artificial
  Synthetically generated peptide
tgccgcctcctcccaggtgt

SEQ ID NO: 13659 - DNA, 20 bp, Artificial
  Synthetically generated peptide
ctgccgcctcctcccaggtg

SEQ ID NO: 13660 - DNA, 20 bp, Artificial
  Synthetically generated peptide
cctgccgcctcctcccaggt

SEQ ID NO: 13661 - DNA, 20 bp, Artificial
  Synthetically generated peptide
gcctgccgcctcctcccagg

SEQ ID NO: 13662 - DNA, 20 bp, Artificial
  Synthetically generated peptide
agcctgccgcctcctcccag

SEQ ID NO: 13663 - DNA, 20 bp, Artificial
  Synthetically generated peptide
aagcctgccgcctcctccca

SEQ ID NO: 13664 - DNA, 20 bp, Artificial
  Synthetically generated peptide
aaagcctgccgcctcctccc

SEQ ID NO: 13665 - DNA, 20 bp, Artificial
  Synthetically generated peptide
aaaagcctgccgcctcctcc

SEQ ID NO: 13666 - DNA, 20 bp, Artificial
  Synthetically generated peptide
gaaaagcctgccgcctcctc

SEQ ID NO: 13667 - DNA, 20 bp, Artificial
  Synthetically generated peptide
agaaaagcctgccgcctcct

SEQ ID NO: 13668 - DNA, 20 bp, Artificial
  Synthetically generated peptide
cagaaaagcctgccgcctcc

SEQ ID NO: 13669 - DNA, 20 bp, Artificial
  Synthetically generated peptide
ccagaaaagcctgccgcctc

SEQ ID NO: 13670 - DNA, 20 bp, Artificial
  Synthetically generated peptide
cccagaaaagcctgccgcct

SEQ ID NO: 13671 - DNA, 20 bp, Artificial
  Synthetically generated peptide
ccccagaaaagcctgccgcc

SEQ ID NO: 13672 - DNA, 20 bp, Artificial
  Synthetically generated peptide
tccccagaaaagcctgccgc

SEQ ID NO: 13673 - DNA, 20 bp, Artificial
  Synthetically generated peptide
gtccccagaaaagcctgccg

SEQ ID NO: 13674 - DNA, 17805 bp, Homo sapiens
atttctcaaagaactaaaaatagaactgccatttgatccagcaatcccactactggtaacctttaacagtatatacccaaaggaaaagaaatcagtatatcaaaaagatacccatactcgtatgtttatcgtagcactattcacaatagcaaagatatggaatcaacctaagtgtccatcaacagaggattggataaagaaaatgtgatacatgtacacaataaagtactactcagtcattaaaaaaatcaaacagcagcaatatggatggaattgctggaagacattatccccaggtgaaacaagccggagacagaaagacaaacactgcgtgttttcacttataagtgggagctaaatcatgtgtacacatggatgtagggtgtggaataacagataatggagacttgaaagagtgagggggccaggcatggtggctcatgcctgtaatcccagcactttgggaggccgaggtgggtggatcatctgaggtcaggagtttgagaccagcctggccaacatggtgaaaccttgtctctactaaaaatacaaaaagtagccgggcatggtggtgtgtgcctgtaatcctagctactcaggaggctgaagcaggagaatagcttgaacccgggagggtgggaggttgcagtgagccgagatcacgccactgcactccagcctgggcaacaagagcgaaactcggtctcgaaaaaagaaaaaaaaaaaaaaaagaaagggtgaggggatgggggaagtgaatgatgagagactacttaatgggtacaatgtatttgagtgatgaataccctaaaaaccctgattttaccactatgtgatctatgcatgtaacaaaattatacacgtaactcataaatttacataaataaactaaaaaataatttttaagttagcaaacaacttttttaaaagaagaataagcagataccccacatagtgagtagacaaagaacatcccaggcaaaaggaacaaacagcatctgcaaagggcttgaagaaggaaacagcttgttttgtttaagaaatgatagaaggctgggcgtggtggctcacgcctgtaatcctagcactttgagaggccaaggaaggtagattgcttgagcctaagagtttgggaccagcctgggcaacgtggcaaaaccgccaaaattaaccgggcttggtggcatgcagctgtagtcccagctactcaggaggctgaggtgggaggatcacctgagcccaggtggtcaaggctgtggtgtgctgtgatcatgctactgcactccagcctggatgacagagtgagaacctgtctaaaaaattaattaattaattaaaaaaaatgaaagagatgatagaagatggtggtgtaatgtgaggttggaaaagcagacctagaacataccacggaaggtcttttaggtgacagcaagggggttcgatgcagtgggaaaccgctggagggatccgacctgcatcccataaagacctctttggctactgtgagggaaacagacattttgggaaggttccagaagtcaaggtagaggaagactagtctataaagcggaccgcctttgtgaaaaatcaacctatgaaagaagccaacatacaaaagatacactggaagtgatcaaagacttccaagagcagccgggaggtggaatctcaagtccagatgttgaatgagttgggtgattgtatgggacagaaccagaagctgatgaggggcccaggatgcagatcaaagagatgggatgagcaggcaaatgccatttcttttcattccgcctattttgcttgagtcaccagtttggtaaggggagagtttcaaccatctgcaagtaatccaaatgcttttactaacctgcctacccatccacacccccaccaaaaaaaaaaaaaaagaaagaaagaaagaaaaataagaagccaaccccagagcttgtacgcctgcattctccacaatcatttctctgtgttacagctcttgtcatcttacattatacatgaataactaatcaaccaaacacaaacccactgatgaaaaaaaacgcatgttggatctagaatgtgagcagggtaaagagtaatattaatttcactggcaaataacaaaatgggagcaaacatgagggatgttaagacaagacttgtgtttttgaatgcttctgggaatggaaactctccaagaatcaagggaaaggggaagaaggttggacatatttggagtgcactaataccaattcttttttcttctggtatgcatatgtgactatatgcaacatcatcctgggtcaggccaactggtcatttaaaccaccatgctgtctgcctcacctagtcgaacagttcatataatgatcttccactattccttaatggacatacaggtgttagtcttaatgcaccaaccaatattgcgataggctggaacaaaaccttttgctctttgaatgtccacagtgagtaacactatgctaggtatgtagtaggtgctcaataaatgtatctttcacacacttcctaaatgaagtctatttcttccttcatcgttttcctgaaagatctttcttgaccactaaggatgaactcctcatctccatgtccagtgagtggtttagaaatgttttagtcttcctcctccttgacttcataatggcatctgacactgctgtgacacttcagttgtcttctgtgactctgaacttttctggttctaatcttttctccctgatggcctctctaccctgacctccaatgatttcttttcctgtttctgcactcgaaagtccatattccacaaggactctgcttttctgtcttgtcactctttatgagaaattaattgtatctcatttcaaatcaatgcatgtatctatcatcctctgtcacattacatgcaaagtatctgcttatggatctgtctgtccaactagacctcaagctcctcaaaaacagatccctcactgtgttcgtctctgtgcctccagtacctggcacagagctggacactcagtgaatgctccatacacacgggcccaactgatccattctcaaattatgctcggagttggtagattgggcagaaattattacccccattatatagagaggggaccccaaagctcaaggaggtaaagcaaacattagaaacatgattcctgtgactggctgtggagactccgtgtaataatcattctggtattgccaattgcaaaaggactgtaaaactaatagagatgctgtctaaataccgacatccaatcctttcatgctcttctgagcaggcttgaattttccagtgcctctcttaaaatacagcccgcaggactgagcataaaactgcatgtggcctgacctgccagcacgcgctgggagtattgcttccctccttccacactctgctgtgctattaatagagcctcagattgcactagggttctcaacagcctcctcgcgctgtaggttcacatcaagctggtgatcagctaaccccccgggtctttctcatgcaatgccttctgtcaggccaggcctccccagcagccacttgggcaatgaatgtttttgaatgctcatgattatttgtgacttagactagaaggtacaacaccagatcatgcccttctttctcatgtggcattttgctgagtgggtgatggggtcttaggggtcctgttcaggacccagagctgtggccagccactgggggccaccagcatcatcggccccacaaaagtaagaggatgatggcgaaattaattttctggctcacttcaaattattcttatgttcatccctactcctcttggattaggtcctttcttggtcttgttctaatgctgggtgtttgtatgcacagcctcttttccctcccacccatggacacagccacattttgatttctcatgccctttccaaatagtagtagtatttttagcatgaatatcttgctcagaaattggctgtacagtctatcccctattgtcttcacatctaatacttttcttttttccctctgcctctcctatgcatcaataccacgtttggctaaagagatttgattttgacctatttgaattctcccttcacagatgacagccctttctccctctccttccttcccttcaattagttttttcagccacttggaattagctgatgggtgattgtagaaattgcaacgtgggctactgtggtgggtctcaatgtcaactccaggaaacctctgaatctggggggctctggtttcagaatctgatagccaggccctgaactctggaatgtggggctgtgacatgagatacagcttctctttgctcggccactagagggaactgaaatgtggggcgcaagaaggcgtttcctctgttcgccagacgagggcgctcatacccatggtcctccaaagttggaatttctcgccccaaaacagatattgtcgggttggcctccttgtaacccaaacatacgatgggatgacattacagctgtgctactgattgctgctttgaccgcctcctatgctgtgtaaatggccaaaagcaaagaattattaaaaagcaggcccaatgttgtccaagctcacgtgtggtttgtgggtctatgtgtttgctgctggcaaatttgcaagcagatgggactccaaggcaaggcgtggaagtgatgatgggaacgttggaagttcacagacataacttgtagagtgtgtgaggccgggtgcgcggaccctgtgtatctgcagctgcgatacttagatttcagtttggcaaggcaggtcacggtggagatggggcaagctgcaagggtggtggagaggaggaagggaaggtgacagtggccctctgtcaactgtttccaggtggagttgaaaggtgtaatcattttcttctgggggccttggcacctttcatcaagacgaagttggtgactggtttaaaaagatttaaaaaattaagctcgagaggccaaaggagaaaatggtttccaggtggaaagggcttgacagaatggtgctcttgtgccgtgactccgaactccgtggagcattccagtggcccactgtactcccacccctccaggcagcactgggaggcagccaagtctaggaggcaaagggctccctaactgccaagcagtgaagatgttgaataaaatatttacttacacgtttaagaataatgatgacagcatgacaaacagtggtgaaacagctttaggggacatggaagggcagccctgggatatttttaatgagaacagtgacttcctgtttaattcccgaggcttgtctcttttgcctaccatacccacactggtatcacaagataccgcccatgattggggagggggttcaccagactggcctagggagtcccctgcaggaagctgccacatggagaggctacagccagcctcactcccaaccctaagctattgcccaccttttgcaactcctgaagattacagctttctgatcccttccccccccctacaccagaagggtcctctgttgtggtcattcaataaatgatatttcttaattaggaatctagctctttcttattcagctggactaataagcaccctatgccctgcttgggtgtgataattttgagttggagacaaggaaaaaggagtgaatgaaagggagtaaaagtcttcacccacagcactagatttcagctatgcccaacgtgaaaatggaaagggaaaatggaaaaaaaaaaaattggccaaacacgctttaggtttgtttttccctccttttgggagctttttgcattttcctccccaatttggaaaaaaaatgaaagaaaacaaatttctctatcatttaaataaaacagacctttatgtctctaaatataatacatcaaacaatgttaggagtaactaaattatacataaagatacttgtttgttagattgttaaaggctgtttgaaaaatagaatttcgctggtgaggtgcctcacacctgtaactccagcactttgggaggctgaggcaggtgggtcacctgaggtcaggagtttgagaccagcctgaccaatatggtgaaaccccatctttactaaaaatacaaacattaggtgggctgtgatggcacatgcctataatctcagctactcaggaggctgagacaggagaattgcttgaaccggggatgtggaggttgcagtgagctgagattgagccactgcactgcagcctgggcgacagagggagaccctgtctcaaaaacaacaacaaaaaataagaatataatttcactttttgtcagcctcacatcctccatggttttgtgtgtttatttttccagatattttatacctccagttatgactctgtagaaagataccatctgggggccaggcatgatggctcacccctgtagtctcagcactttgggaggctgaggcaggtggattgcctgaggtcagcagttcaaaaccagcctggccaacatggcgaaaccctgtgtctactaaaaatacaaaaattaactgggcatggtggcaggcgcctgtaatctcagtcactcgagaggctgaggcaggaaaattgcttgaacccaggaggcagaggttacagtgagccgagatcgcgccattgcactccagctgggagacagagtgagactctgtctcaaaaaaataaataaagataccatcttggctttcccatattatacagatccagaagaaagaccaacttaggatctctatgcacatgattatttcatattttttggaagaaaataaactagtgttgaatttaagaacatgctcagaagtcatgatttttgaggaaggaggctatttatttaaatcgatataaaggaccattagttttagacctgtaatttatacttggtgaaattttcatggaaaaaaaacaacaacaaaaaaactcatttccctaaatattttctagtaaaaacatggcttgcttttttggtgcaaagtctgccacgctgtttttaaaagcgaggcttacgagaccgtgggagagagataagtgaacagcctctttaataagagaggcgtccagcgtggcggcggaatgcaataccaaaaagtaaacaaagagcatcgtgtgaaaaagagcaagttgaaatgaatcttgcttttcctatttgaaaaacacgctcatggttgttagcaactgagtcaagacatttaaatcatatatatacttttagatcttgacagtgaccttttataagtgtacagtggggataagaagatgagcaaagccttgctgcagaaaaagcatttcagttaattgaacatgaaatgtgttaccatctgataacattaataatatgtgatcgctactttgtatctaatatgcagttcatttggttggaatctaaagcattctataaatgttagagtatgaatcctgttgcaaacctataaactaagcagctctattttggtgcattttgaagtatctctgtgttagttatctatgctgtgtaacaaattatcccaaaacttagcagcttcgaacaacaaatatttattatctcagcatcaatcaggaatggctaagctgggaggttctagttcaaaggctctcattaagttgtagtcaaggcattggccagattaacaatcatttgaagacctgatgagggccggcagatccactcataaggtgtctaactcacaatcccagcaagttagtttgagatgttgacagtaaacctcaattcttttctacactggtctctccgtagggcatggagagatgcctgagcatcctcatgacatggcagctggcttcccccagagccaatgatccatgagacaaagcaaaacggaagctacaatatctttggatgatctagccttagaattcacccatcatcacttccttcaggtcctgctccttagaagccggttactaagcacagtccacactcgaggagagggcaattcgactccatcttttgaaggagtcttaaagaatttgtgagcatattttaaaggcaccgcaatcccctatttacataaggacagttgaaaatgatggtggcttacctgctcaaggtcaacgaactactggtaagaccccacctggaaggcggcaggcttttttatttattgtaaagcaaaacagaaaacccacattcttgaaataactgcacatgaatcccaaatctgtctctttcaaatgtccaagaccttctaaaagtggcaggatgctttctgtttagaaatggatgagatggacactagactggaagggtcagcctttgattaagagtcagctttcctcttaatcagctctgggaccatgagaacaaaaacacttttctaagggatgttttcctcctttgcaaaatatgatgggctagccgaatggtttccaaagttggtggcctttaagtcctctggggacttaaaaactcactgatcttgtgttaaatccacaatgtccaggaatctgtaccacttaaaagcacttggggactctggcggcctgttttgcagacagtaggaactgctcggctacatgatttctcactcttccacttttaacattattttatttatttttgagacagagtctctctttgtcacccaggctggagtgcagtggcatgattttggcaacctccgcctcctgagttcaagcgattctcctgcctcagcctccaaagtagctgggattacaggctcccgccaccatgactggcttttttttttgtattttagtggagatgggggttttaccatgttggccaggttggtctggaactcctgacctcatgtgatctgctcacctctgcctcccaaagtgctgggattacaggcgtgaaccaccatgcctggccaacattattttaactctccccatcagactgggtatgcccatgtaaattgttggttctccatcttcactacaatcatgagcagaatttttaaaaaatatgatacctagggccctccctaggcaaaatataagtcattctggggtggaactctggtaccatcacgggttgttggcttgttttcatcagtacatttaaaactaatcatgtttagccttgttggcacattagaatcacttggggagctttaaaaaagcccactgcccagcctgtcccccaggccaattaaatcacaatctcgtgggaaaaccaagaatcagcattttttaaagttccccaagtgattacaacatacagccaaactgacctatgtttgccacatttgagataattctaatgctaattcacctataagggattattcagaaaaaaatcccaacatttagatgccacagtactctaagaaaaaaaatgcatttaaagtggaagatattacaattttgaaatgaaagatattaaaaattaaatggaactaagttccatttctggcaatatggtagactaagtaacttgaaaatcctcccatcataaaccacctataaatactggtcagaatgtaataaacacccatttaaatgagctctcaggacagtaagcaaaggctctcagagtcaggaagaagagggagattctagcatggtatgcaagtaagctgaggttgagctggtcttaggcaggtttgctggtgttgggaacctgaggtttgagcatcaaaataggaaggagactatgcttaaggtccattaaaagtgggaaaatggaattcagaattcccataaagctggaatcccatcaagctagaacctcctgaatcactagagaaataatcactggaaaaataatctccccaatgtcacaaggaaacaagaaaatgtgcctgtctttgcaggggttgagggtggggaataaagggctttactgagaatttgagattataatgtggtatggtccaggaaccccaaagctgagaatgaatacagaaatacagacccaatgccaaactatacaatgtatgtggatataatcctccacaagcaagatgtagcagacacaaaggtcccaagaacctcaggtaacagaactatcaggcagactataaaataagcaaattgaaaattattaaagacacaaagaggccgggcgcggtggctcacgcttgtaatcccagcactttgggaggccgaggcgggcggatcacgaggtcaggagatcgagaccatcctggctaacacggtgaaaccccatctctactaaaaatacaaaaaaattagccgggcgtgatggcgggcgcctgtagtcccagctactcgggaggctgaggcaggagaatggcgtgaacccgggaggcggagcttgcagtgagccgagattgcgccgctgcactcccgcctgggccacagagcgagactccgtctcaattaaaaaaaaaaaaaaaagacacaaaggaacctttgacaccatgagaaaataacataacactctaaaaaaggtagattttaaatagaactaaatagaatttctagaaatgacaaatatagtcaccaaaatgaaaagctcagtgatgagttaaacagcagattagacagagtcgaagaaagaaccacagatggatctgagaaaattgcccaggaagcagcaaagacaaagtgaaggaaagtctgacagattcagagtgtgctggatagaaggagaagatgcattatacatttcatataagtaccaaaagacaatgagagggatacttcatttagagaatcccaagattatgcatatacaatgagtattgaatcagataaagaagaagaaattcatacttgaatatagcagagtaaaaatgtaggaagccaaagacaaggaaaaagtcttaaaaccagagagaaaagacagattacctacaaaggaatgacaattagactcatagcaaatgtttcagaaataaagaataggaagacatggtatattcaaaaaagtgctggggtaaaataactgccaatcttgagtattacacccagagaaatcatcattcaggaatgagagtgaaatatgacatgtttgtcttagcggagagagcgtaccactcaacaatcccctgaaaaaaactaaaggtatgtttcaggggaaagggtctatatctagaaggaaattggtaaataagggcaaatctaaacgatgaattgactgtatataaaattacaatagagattaaaattaggggtataaaaagtaggtggatctaaaaataagcaacagtaaaacataatgagaggatgtaactgaagttgaatcattcttagcttattggatagttctagggcatttgatttactttagatcacatgtacaggttaaaattgtaatcaccgaaagagtagaaatagaatttacaacttccggccagacacagtggctcacgcctgtaatcctagcactttgggaggccaaggcaggcagatcaattgaggtcaggagttcaagaccagctggccaacatggtgaaaccccgtctctactaaaaatacaaaaattagctgggtgtggtggtgggtgcctgtaataccagctactcggaggccgagtcaggagaatcgcttgaacccaagaggcagaggttgtagtgagctgattgtaccactgcactccagcatggctgacagagtgagactctgtctcaaaaaaaaaaaaaaggcctcggcctcccaaagtgctgggattacaggtgtgagccaccatgcccggccaatagcatctcttatacattgctagtaggagtacaaattggaacaccactttggaaaacagcttagtattaccttgtaaaattttacattcacgtatgttacgacccagcaattactccaaagagaaattctgatctatgtgcatcagaaggtaaaaatgttcataataacactgtttataatagccaaaaaaaaaaaaaaattcctgaaagcaacccaaaggcttgtttgtgagaatagagaaactaaactgtggcacagtcacataatggaatattatacaactgggagaaagaatgaactacaacctgatacaaaaatctaattttgttccccccacccccccagggccctggctagaggatctaattgattcttaataatttcatattgagtaaattatcaagcctcagaaatttttcataaagtttcaaaacaaaaagtaaaacaaaacaaatattagtcattgatatgcatgataaaactttttaaaaagcgaaaaatcataacaaatacaagattcagactggtggttactttagaggaacaaaatagggaggaacacataagcagatgttacataagtcaagtcattgtttctgttttagttctctggttgaatagcaggtttacaggtattcatgatatcagcaaataaaataaaatagggccatgagtatacacaatgatgatagtgtgttatactagagattgtgactaatatatttttgtgcccctaaattgtgatattttgtgatctttaaaaatatcagcaatcacaataaatgtaaatggactaaacttactagttagcacaataatgaaccagagctaactatatgctatttacaggagactgaacaaaaaatttgggacatggaaaggttcaaagtaaaaggaaagagggaaagagaaagatctataagtgaagggctaattaaaagagtagttacatttattacagacaaagtagactttaaagcaaaaggcattagggataagtatcttctgtgccaatattaaaggaataattcctaggaaaatagcaaatctaagctcgtatgcactgaataacaaggccttaaaatacacaaagcaaaaagtatgagaagcagaaaatgtatagttacagtgggaaattttaacagttctttttgatgcacctgacaacatacttttaaaatacagcaaaatttgagagaattacaggagaaactggcaaatctagtcatatagaaattttaatgtacttctataaaaaccaacaggtcaagctgacaaaatattagtaaggctacaggaaatctagacaatataattaataagtctgatctaatagacccatataaaatgctgtacttaaaaattaaggcatatacattcttttcaaatctacatgaaatatttataaaaattgactgcaccaaagcaagtttcaataaataacaaagaatctgcttcatatagatcacattctttgaccttaattcagttaagttagacgttagtaactaaagaataacctcaaatacccctcaaatacacctgtattaattcactagtcaaacaagaaatcgtatctgaaatctaatttttttttttttttaaacaggatctcgctctgtcacccaggctggagtagtgacatgatcatggctcgctacagtctcaacttcccaggctcaagtgatcctcccacctcagtctcctgagtagctgggcctataggtgcatgttagcacacctggctagtttctagaaaagttttcttttgcagagatggggcctcactatgttgcccaggctggtctcaaactcctgggctcaagtgatcctcccaccttggcctcccaaagtgctgggattacaggcataagccattgtgtccagcctaaaatctaaactttttttacctcattggtgataaaaagtctatatatcttgtggaatatagcttgagtggtacttaaagtgaaatctgtagtcttaaatgttaaaatcagaaaacagatggctaaaaattaattacctaaggcaacaattcaaaaaaaaaaaaaaagagcaacagaataaatccaaaaagagcagaagcagaagggaatactatatgatatatattaatattacattacatattatattctcacaaactatataatagtatatattttctattgtgccatatataacaatataatatataataatatataagaacaaaacttactggaacagaaaaagaaacaatattgaaactaaagtctggttctttggaaacactaatagaaagtagaaagaaaacattagtaaaaaaaaaagatctctggcacagctgatccagataagaaaaaatacatataaaatgatatttagaatgaaaaaaaaacattatggatagatagagcagagattaaaatacattaagagataactatgaacagcattttgtcaacacatttgaaaacctagatggtatggataatttccttgaaaaacatagtgtataaaaatagattcaagaagaaaacagaaaacctgaagagatctacgagcattaaagaaatggaatcagtagttaaaaatcaacccacgaaatgtctatcccagacccagacaatttacctgcaaaactaccaaacattcaaggaacacataattccaatcttacacacactgttccagaaaatgaaaaaagaaggaacatttaccggttcattttatgagaccagtataaccagacaaaggcagtaagaaaaggaaaaactgcagccaatttgacttatgaacatgaatacaaaaagaatcctagaatgaaattaaatgttggccatcattcattcattcatccactcactcattcagtcaatcattatttattgagcgtcaaccgtgcgccagcaggcactgtgctagtacatggagagcagaaaggcacgggagcttctggcttagaggagatgggcaataaagcaaatgatcatacagggtaaggtacacagaggacgttctggtaaggtaactgcatatcaaagggcattcgaccctgtcagagaggtctgggaaagatttccaggcatgtaagtggagtaagggtgtatgtgggaagactgttttgtaagctgttgcagggcctcaggtgggagatctgggatgcagcagcaagaaagatggatttgaacttgggcttcctttagaaaggctaagtggagatgttgaataggaaattgaccagagcctggagctcttcaggaagggtggggctggagatttcaatttgagtggcatcaccatgtgtttaaacccatcctggaagattgagtttgaagaaggaagtgtccaacattgtcttgggctgttgagactttcagagggttgaggactgatattgtgctgcttgaattctcctgatgcaggggctacattgagtgagctggagaaaaaaaatgcataaaataataataataataataataataataataataagctattacaaataatgtagagcaaaggggcagcaagagggaatttttttggacaatgaaactgttctgcatcttgattatggtggtggttacatgactctatacatatgtcaaaactcataggattacagaccaaaaagagtaaatattaccgtatataaattaaaaataaatgagtaaaaacaatgtagtaatggagacttaaaatccagttctttctaagccctgactttgtaaccgcagctctagcccctctctggattttaaatcagttctataagtgtcagcttgtggaggtctataccagacaggaagggcccccaactctcgccttgtgagggacagaataaacacgcaggcagcagaggccacacggcattggactgatggtcagagggtgggggtggggtgtagcctggtgagtttggcacctctgagacgctgatgtataatgaggggattagattaggaaaggcctttctacctaggatggcctgtggttctactgtaaaaatcccaaacacaatacaattagctctgttgtctgcattttgtttagaataatcaatcataataaacaatcattgtaacaactggctgttcaacacatgagaccccagatgatttgggaaggagcttggagtgacaggaaatgtttgggtttgtggtttaaagccttagagcaccttctcaatatgattatattgagtagtgattgataataaacacgactcaggtttacagtgaaaaaggaacttttacaacattggttcacttcagcctctcaccttcaccacatcaatcctgtcaaggaggaattactgcaatttagggaacagggagactgagggtctggtcactcaaggctatggctggtgttgagattttcccaatattccatttttccaaagcccacagtggatttggttcagttttggtgttgagtgtattcctttgtctcctaatcctatgaaaattaatggaaaagtgttaattgggcatcaattcatgcttaacattaatctcagtatttgatgaaccacaactttatgttgcccctcatgccatattaactcagtttattgcaacaatttaaaacgatacagatttaaaacaatatgggtaattgtatccgtattgtttcaaatgccccataaattgaaaccagcccgaatttgggcagtctggaatctgccggagaaactttcatgcgatgcctttggaaggctacagacattgtctttttggagttttcagtgcatgaaggtatgaaaccgcatttattaagcacctactgtatgccagaacccgtgctgcacaatactactgctgctaaggtgggagtgattctgaagccttctgccaccctagctacctctgcaggtcgtgaggggtcttgggctatttcagtatcatgcactttactatcctggcatacaaaggctgggtgagaaataaaatatataacgaacggattacacaggggtttcctgaaataaccacccttcccatccatcccagagacaccccaaaagtacttctcgttatatacaaacatttgctttgaacctcaatcatgtgaccttgactcctataacctatcttattacatttttaaaacactgtatgattaacgcggaaaccctttcttcggcactttctcgccactggaatcgcgtcagtttctcaaagttccaaaataacctttcccgggcacggattggtacctctactggggaagggcggggaaccgcgcaagacgtgccggtgtggagccagagccagagagaacttccagcgcaaaaggaaaataaaacttgtggctggtgtttgtgcaggagggtctccgccatcctgaagccccccgatcctggggcgtctcgggggccgccaaaggagcgccagggtgtgggtttgctcccgacgtccttgacctaaatttctgagcggtggctggaaacagggcacagcggagggcgggcggctggtgccattcccggatctcggcggcaggggccggcaaacttgaatggagagggcgaactagagagggtggggggcgtcttctcccaggtccgggtgaggagccgcagcaagctccccgcgcctcccctcccccgatccacccgccccccgcagcccatgtgatccagggaagtcggggtgcgctccccctcgccctgcgccctgccggcccggaggcggggtcccctccgcccgcggggttcgcgcgccacccttgtgggtccggccgtggggggccgagtgtgcgcgcgcgggcaggcgggggccgcacgggggtgcgtgacgtcaccggcattggttacacgacgttctagaactccgccccacgtgcgccggggaggagggggaggaggaggaggagatgggggtggggaggaggagggggagaggtggggatgggccgggggggcggggacgggggggtgtgcgaggcagcggggctgagctaagccgagcccacgtgtgacggctctcgccgctgccccggctccgccgctcgcagagagattcggaggagcccgggcgggggggaggaggagggggaggagggagcggagatctcggggctcggagccggccgccgctccgctccgatcgctgtggggcttggttttttgggggtgggggggcgggggggctcagatatg

SEQ ID NO: 13675 - DNA, 4510 bp, Homo sapiens
gtcatttatttctgctgtgaacttcattttttccttccttctgttagctttgggctttgttcttctttttctagttccttgaggtgtaatgtaatgttgtttgacatctttcttcctttttgatgtaggtatttattgctataaacttccctcttataactgcttttgctgcatttaatactgactataataagatacgatgtaatagatttcaaggaattatgtatttttgaataaattaattctttaaagttgcatatccagttgcagatgaacttcaaaaatcttgcagttttatatctgttacagtaattgccaggttttgttgttgttgttttgatacattagaagttctagaattgttatatcctcttgatgaattaatccctttatcattctagaattaccttgtctctttactgtttgtgacttaaagtctgttgtatctgatatacctttgcatggaatatctttttctatccctttactttcagtctatgtgtatctttaaaggtgagatgaggttttgtaagtggcatgtagttgggtcatgttttttagtccatttagccattctctatcttttaagtggaaagtttaatctatttacattcaagtttattcttgatatgtgaaggcttattcctgtcattttattaattgatttctggttgttctgtaggtcctttgttcttttctttctctcatattgtttagcattgtggtttgttggttttctatagtgataacatttgaatcctttcttgtctgtgtgtgtttgctttaccagtgggtttgatactttcgtcatctgtttttcataatggtagtaattgtcctttttgtttgtttgtttgtttcttttttgagacagggttttgctcttgttctgtcctccaggctggagtgcagtggtgtgatcatggctcactgcagcctcgacctccatggtctcaggtgatccttctgcctcagcctctcaggtagctgggactacagaaacctgccaccatgcctggctaattcttttgtatttttcgtagacatggggttttgccatgttgtccaggctgctcttgaactcctgggctcaagcagtctgcctgcctcagccacccaaagtgctaggattacaggcttgagccactgtgcctggcctgacattgttctttgacttccatatgtagaactccctcaagcatttcttgtaggtctggtctagtagtgttgaattcctcagcttttgcttgcctcagaaaaactatttttcctttgcttaatgaaggataattttgctgggtatagtatccttgacttgcaggtttttttctttcagcacttttcatatatcgttccattctcttcctggcctgtaatgattctgctgagaaatctgctgttagtctgatggagcttcccttagaagtgactagactcttttttcttgctgtttttagaattctctctttgtctttgacaagctgttgtctctgacaacagttctctctttgtctttgacaaactgttgacagtttgactctaatgtgttgtggagaacctgttggaattttgtctttttggggatctctgagcttctgtatctgaatgtctaaatctcttgatatacttgggtagttttcagctattatttcattaaccaggttttctattccttttgtattttcattgtcttctagaatactgaaaattctaatattagtttgctttatggtatcccatatgtcatgcaggctttgttcattcttttttctttatttttgtctaatggggttatttcagaagacctgtcttcaagttcagaaattctttcttcgtagatgctctagaatgtattttttatttcattaaatgaattcttcagtttcagggtttcttgttttctttttaaatgatatctctctctttggtaaatttctcattgatatcctgagttgtttttctggtttctttgtattgtttatctgtatgcgtttgtatctccctgagcttctttaatatcattatttttaattctttttctggcatttcatgaatttcttttgcattggaatcttttggtagaaaattattttgatcctttggagatgtcatatttccctatgttcccatgtttcttgtgaccttacttctttgatatccacacatctggtgtaatcatcacttccatttttttgaatttgctttcatagggtaggactttttcctgaagatttgactggggtgtttgttggccagggcactttgggtttgaatctgggtgcatgcagtagtgtagtctctgtaagattttttttcctttgtaaacagcatcagtggtgtctgtgatttcctcagtggcatagtgtgtggttgtggaggctgtggtgaacttttgctggggatggtgacaccagctggactgatcctcagtcctcagttgtggcagcagttggacaaccatgcctgtacattagccccagggtggcttacattagtaatggtgttagtgggtccaggcagtccaatttttgggtctccaggtgacttgtttgggtaccaggagtggcagtgatgggctgggcagctgagtgggtccacaggcccctgggcagtgagcatggcatgggttatgtcagtagcagtggtaggagaacctctggctgtccagttgtctgtgcttatgtcggcagtgacggcgattggctgggtaggcaagtcctaaaacctgcaggtggcaagtgtgagtgggaaccagctgtggtggtagtggcaggttgggtgggccacatcctcagacccccaggtggaatgctcagttgacactggacgtggacaaactggtgcgatcccaaggcccccagataacatgcttggatacgtgggagtggggtgctgagctgggcagggtgagagtatcctcaggccctccagtggtgttagcaggtgctgtttgtggtgggcaggagcaggatgatttccaatttcctggtggaatgttcaggtgggggcagcagtggctgtgctgtgccctgatgctggggagggtgcagttgctgtcagtgggagcagttgtagggagttggctaaggagtgtgcactgcagctgcaggtggaggctgtagatgtgatgaagctgtactcagggtgcatgcaaatttgcattttgacacctagcggcagcagcctgcaatggtggcagctgtaggtggtagagcttgtcctcagggcacataccaatatatggcagcccttctgctgggagcagtggggttattgccaatggcttgtgctttggtcccagaggcggcagccagcaatggaggtgactgtcggtggaggatgtcagtggggctctaggggtgtggatatgcaggggctgttgggctccagggtaggaggcattctggtgtgggttgggctttaaaaatggcaccgtgctgtagctgcttaggactcaggggtgtgttggaccagcataagctccctctctaaagcaatgtcattgtgcagtctccaggcagctccctatgttactcccagggcccatgaaagttgacgggctctcttgtgtctgggattgcaggagtttgcagtgaaaatgtgggccactgggagtctctcacttactctttccccacattgtgcaggctctctaggcttctggctgatcctggctgagcaggctgccccacttccctctccttccttgcattaggtgttttctatcacttctctgttgaatttccgtgttctctcttagatgacctattcaaagtgtgattatctactcgctattttggttcttctttgtggagcaggtgagtaccagataactctagtcaaccttctggacccctcttcccccaatttgagatctcttcttctgttgtctgtaactgagtttaatgcttgtttgttcatgttaggattttatatcatcgtcctcaattaggttgttaactggaattttataatctttgtccacaggaagtttaaaatgtatgatttcttgcattgtgctttgtatgtagtaatacacgatatttatccagttaatggatttgacagccattgctgtcaaggagcagtccttctttgtgtatgaagggtgccttatcaatattatttccatttgtaactttatttatttatgtattcatttttgagacagggtcttgctgtgtcacccagactggagtgcggtggagtgcggaggtttgctgcagcctcatcctcccaggttcaagcaattcttccgctccactcccagagtagctaggactacaagtgcgtgctgccacgcccagctaatttttttcttttgtatgtttttgtagagatgaggtttcaccatgttgctgaggcttgtctccaacttctgggctcaagctatctgcccgcctcggccccgcaaagtgctaggattacaggtgtgagacactgcgcccagcccatttgtaactttattgttttctcttacaggcaaatgttctgaaaaagactctgcatg

SEQ ID NO: 13676 - DNA, 4514 bp, Homo sapiens
ggccctgccgcccagaactcgctgggcaagtcgtgccccgcgtgaacacacagaaggggcttggggaccgagcgcggcccatcagtccctcagaccctgaggacccagaattccctaaggggtccgaatccgagtcctgcccccagcccttaaggcacgggctccagggaccccaggggaagggcgcggggcattaggtacgcaacccgtttccccgcacctggaaaaaaactccctttccctcccctcccctgcttgttgagtgtccggataaccagaactctaaggcgccccgtaataacgaccccgctgtccctccacccacccccaagtgccaaagcgagggatggaagcgctttcaagcgttccaagggcattgaggagcgagctggagaggcgcggggatgcggggtcctccccgcagtcttccggaaagggcgggggagggcgcggcaagttccggagtggggcatgccgtgggagcccacgagggcctcagcgcggatcctccgccggaaaaccggctcccgcgagccgccgccgcaggtttcctaggccccgcgagtcccgcagcgaagccctgcgtctccgtccgacgcgggggtctgctcagcctcgggtgggccgcggccaggcctgactgcgggggagagggccgaacgtgacctccgaggtcacccccagccagctttctctcctgtggtcggaagtggttttcttctcgatctgggcgcctactccccaccacttggtctgagaggggctggggccggaaggccagggaatctctggtggatttgggggttcatattgctcagggtaccagccgatgcgttttgaggggcgggagtcgaggaattagaatcgcctttaaccctcaagagttgcgccttcagcctcgggatcccagatgcgtcgttggagccagggccgcccccctacctgttgggtttgcgttttaactccagcgcacaccttgccggcagccctcggagctaggggaggggtctcgtttccccgcagcccgccggacagacgactggggcacgggaggggcggtggcagggtggtctgtgtgtggctgaaactaattgatctggagcggaaacgcacgtctgcggttggggcgatggggggggcggtgcggctgtccatgtgccgagcgtgtggctgtctcgggtgggcactggggccggagttcgccccggcccacctcgcagttttggggcgcctgggatcggcgctacgtaagcgaagcagagctgccatagcacgtgggccgccacgcgcaccccaaaagcaagcagtgtggggggaaggggagctcgagcgccttcggagcccaggggccggctttcggaagcgttttcccgggcgacttaagggcttaacaatggaaaactcgcggagcctgagccaagtcctttcaagtcgccgccaggtatgcggctgcaggtgaccccacctgggtgcgcccgcccgccagccgccctggtggaaaagcgggtgcgggaggtcgctggcgaaaggtcgggactggtccctgcaccacccgcccccaacccaagccccgagccccgcggcgcgcagccgcgctgagtcccggggtctgcgtcgcggcgcgccggttcctgaatgaacgcgctcccttcccccgcctgaatgaaggttcccacagccagggacggtggcgaacacgcgcctgcagcggaattcgctttctcctgaccgaccatccgcccaggccgcggtcaccggggcgggggccagggggcgaggaaagcgtgaaggtgatttcagttaattttggattttctttcaaacaacgtggttaccctcccgactgggccacttgccctttgtctccaaatggtcaccaagaaataagaacagagcactttaaatgagcccagaatccgcagttcctgcttcgtggtgggttttaagaagacagtgtaaagtaaaactgcaaccgaaaagttttttaaagttgcttttctctttggaaaaaataaaatcaaaatgctttctctgcgcttcttgaagcaatgaccctcaaaagcccagaggtattggccccctcgggggacccgggggccgccaagcagggttcccccaggtgggggctgggcagctggcgctccccgccgggccccaaattccagcgccgggccccaaattccagcgcctcccccgcgggttcctggacggctctttacgctcgctaaccgggcttgcaattttgcgctcgtccctgagccgggaaatcaacgaagttcctagtcgagatctgcccggtccgcctagtaacagcgccgcgcccccattggctcatgctaattccagtttcctctgtcttgcgcccgggatgggggggtgaagctccctcctggacccagagccggttgtgccggagtgggcgagcctctttatgccctgctgcccctagccgacttcggcccgcttcgcgcctcgggctgggccagggcgcacgcggggctcggggcccctcgccccacgggatgggagaggccgggtgatagctccgggccccataaatcatccaggcggccgccgggtcgggattttatgaatgaaaaagcagctgggccgcccttgtgcgcgggctgatgctctgaggcttggctatgcgggggccaacgcgattgtgggtgctcggggagtgggggggggcacgaccgtaggtgctccctgctggggcaacccatcgctccccatgcggaatccgggggtaattacccccccaggacccggaatattagtaatcctaattcccggcgggggagggggcgcgggaggaattcaccctgaaaggtgggggtggggggggtcgcatcttgctgtgagcaccctggcgaaggggagagggctttttctatcagttttctttgagcttttactgttaagagggtacggtggtttgatgacactgaactatattcaaaaggaagtaaatgaacagttttcttaatttggggcaggtactgtaaaaataaaaacaaaagttaagacagtaaaatgtccttttattttttaatgcaccaaagagacagaacctgtaattttaaaaactgtgtattttaatttacatctgcttaagtttgcgataatattggggaccctctcatgtaaccacgaacacctatcgattttgctaaaaatcagatcagtacactcgtttgtttaattgataattgttctgaattatgccggctcctgccagccccctcacgctcacgaattcagtcccagggcaaattctaaaggtgaagggacgtctacacccccaacaaaaccaattaggaaccttcggtggtcttgtcccaggcagaggggactaatatttccagcaatttaatttcttttttaattaaaaaaaatgagtcagaatggagatcactgtttctcagctttccattcagaggtgtgtttctcccggttaaattgccggcacgggaagggagggggtgcagttggggacccccgcaaggaccgactggtcaaggtaggaaggcagcccgaagagtctccaggctagaaggacaagatgaaggaaatgctggccaccatcttgggctgctgctggaattttcgggcatttattttattttattttttgagcgagcgcatgctaagctgaaatccctttaacttttagggttacccccttgggcatttgcaacgacgcccctgtgcgccggaatgaaacttgcacaggggttgtgtgcccggtcctccccgtccttgcatgctaaattagttcttgcaatttacacgtgttaatgaaaatgaaagaagatgcagtcgctgagattctttggccgtctgtccgcccgtgggtgccctcgtggcgttcttggaaatgcgcccattctgccggcttggatatggggtgtcgccgcgccccagtcaccccttctcgtggtctccccaggctgcgtgtggcctgccggccttcctagttgtcccctactgcagagccacctccacctcaccccctaaatcccgggggacccactcgaggcggacggggccccctgcacccctcttccctggcggggagaaaggctgcagcggggcgatttgcatttctatgaaaaccggactacaggggcaactccgccgcagggcaggcgcggcgcctcagggatggcttttgggctctgcccctcgctgctcccggcgtttggcgcccgcgccccctccccctgcgcccgcccccgcccccctcccgctcccattctctgccgggctttgatctttgcttaacaacagtaacgtcacacggactacaggggagttttgttgaagttgcaaagtcctggagcctccagagggctgtcggcgcagtagcagcgagcagcagagtccgcacgctccggcgaggggcagaagagcgcgagggagcgcggggcagcagaagcgagagccgagcgcggacccagccaggacccacagccctccccagctgcccaggaagagccccagccatg

SEQ ID NO: 13677 - DNA, 4274 bp, Homo sapiens
ccattctgagtatcttccaagtgttagctcctttaatcctggaaaggaccccatgaaattagtacttttattacccctgttgtacatatgagagactgagtaaaagccggtggcttgtccagggtcacacagctaactggaatggccaggagtagacctggtgaccatggaccccagaccttgatcactgcacacgctgcgtctgggacctcgcctggtacctgaggtccgtggcgcgctggtgctgatcattcagagtgctcatgggaagtgtagtctagagtctgtgtgcttcctgatctccttgatctccattttattgaggaggcctttaggccacccgaggggtccagagtgaccctgtggattagcagtggagctcagcttgagccagcgctcttcaggggtcgtgttctgcccccattctctggttcattctgcaggtagcagggaatcattgaagattagagagaatcaaacacctggagagagatgactctgcccggggagcccaggctcctgtctgggtgcacactccagggctagatggtgacttctcagctactctagcttcataggctcatagtgcatgtgagcactcatgtggacacacgtgcacgcgcacacacatggacacacacacacacacacacaccgctgtctttggaatcagaccatgaaaatgcttcctcagaggcctaggggtgaggaagctgaggtgagttgtgcctccagctggatgtgctgggatggggtgggagatgaggtggccacacctgggtggcaggaactctggggcagtgaaccttctaacgaacagatctgggatgctgccatgaggaggaagagggagtcagcagccatgcctgccaatgcctcctagcgcatttgtccatggttagcggataattattgtgtccctatgggtcccaaggtgtattattttttttttgctcttataataaatcaacacaaatttttagcagcttcaaacaacacgcatttattatctcacagtttctgtgggtcagtagtccggcgtgacatgactaggtcttctgtgtaaggactcgcatggccaaagtcaaggtatctgaagggacaagggaaaaatccacttccaagttcaatctggttgtgagcagaattcagttccttgtggttgtaccatgaggtctctggtccccttcatcttcaaagccggtaatggacatcgagtgtttctcttgcttggaatctggcactctagctggagaaaattatctgcttttaagagttcatgtgattagattgggtgtacccagatgctccatgctaatctccctattatgcacagatgcataatcctaattgcatctgtgaagtgctttttgccaggtaacatggcatacttgtaggttccagggattagtgcttgtcctccccctgctattctttagtgggcagggggtcatctgcctaccacggaggtaaggggtcaggaggtatgcatacagcaatgcccaaaaagagactgtccccactgggatggagtttaccgcctagacatgcagtcttaactcagaaatatggagatagcctcgaaggacaggacaggtactgggcacgtgtgggaatggaccaagccaggtgctccgggggctttcccaaggaactaaggctgagccaagaactgaaggatgagttggagtcagatgagggaaaatgtgggcaaactggatttcagaaccaacccccaaccctggagccaggagccatggtactgaaggacagtgcgccataactcagagaaccagggagggttggcggaggctcacagggaccgggttaccccagggccttgtgacagtactacccctagtatcagaggagactgtcattggcatttaggccacttggtgctcataacacctctatgtcaggtgaacactattgtcatccccaaattacagatggggaaagtgagccaaatgtccatgctagtaagaggcaaatcatatcacttctttgggtacccttctagaaggatgaggctgactgccactggaaacagctggggagggtacaaggagatgacaagtggctcagaggctgtcctggctataagaattaaagaggaaagaaacaccaagggtggctcgacagtcaacaaggacaggtttattttggaaaacaaacttgagaggggcttctggccaagttaggtcagagccacactctcttacaaactaaggatatttaagggttttggagggggttcttatcataggttctgaatgtttctgtgtgagggaaagtttattgcggggatggaatgtctctggtcagaagggaggctgtctccgggttggcatgtttctggtcagagaagggtttatcttagggttggaatgtttctggttatgctgacattagctattaggctgatattttcgggctggatttaggcggcttttaattaagggggaacttagaatggtggtgtttgttcaagatggcaatgctcctgctccgtcactggccaggtaaggcaaccctttgttatggtaacaacctgagattggcaggggctcacctccaggggcagctcatgtgcttgctggcgaggctgcaccttgtcattcaggttcacagggcacaggtcaaccaggccctggctcttcagtcttctgcctggagtgacttatgtaattctgctcagctttcatagggcacagggagtcggggctaactctgctgcctggggctggaaacagactcctcccttgaggagcagcagtccaccatagggaagtcacagtggtccaggccaaaggggatgcaggtagtgtagactaggcggtagttcagggaatggagagaagtgggaataaagggatagtgaaaggaagcatattttactggcaggtgatgaggtgtaggaggacaagtcatacatttggactttacagagcagtggacactcagtcagctgctgtcagcgcctgggacttaggggagtgcccctggctggagacatggtatggagtgccatcagttagggagccctgggcacaggtaagagaaggtgtgacaccaggagggaaagagtctggggcccagctgcaggaaccaatacccataggctatttgtataaatgggccatggggcctcccagctggaggctggctggtgccacgagggtcccacaggcatgggtgtccttcctatatcacatggccttcactgagactggtatatggattgcacctatcagagaccaaggacaggacctccctggaaatctctgaggacctggcctgtgatccagttgctgccttgtcctcttcctgctatgtcatggcttatcttctttcacccattcattcattcattcattcagcagtattagtcaatgtctcttgtatgcctggcacctgctagatggtccccgagtttaccattagtggaaaagacatttaagaaattcaccaagggctctatgagaggccatacacggtggacctgactagggtgtggcttccctgaggagctgaagttgcccagaggcccagagaaggggagctgagcacgtttgaaccactgaacctgctctggacctcgcctccttcccttcggtgcctcccagcatcctatcctctttaaagagcaggggttcagggaagttccctggatggtgattcgcaggggcagctcccctctcacctgccgcgatgactaccccgccccatctcaaacacacaagctcacgcatgcgggactggagcccttgaggacatgtggcccaaagacaggaggtacaggggctcagtgcgtgcagtggaatgaactgggcttcatctctggaagggtaaggggccatcttccgggttcaccgccgcatccccacccccggcacagcgcctcctggcgactaacatcggtgacttagtgaaaggactaagaaagacccgaggcgaggccggaacaggccgatttctagccgccaagtggagaacaggttggagcggtgcgccgggcttagcggcggttgctggaggaacgggcggagtcgcccagggtcctgccctgcgggggtcgagccgaggcaggcggtgacttccccactcggggcggagccgcagcctcgcgggggcggggcctggcgccggcggtggcgtcacaaaaggcgggaccacagtggtgtccgagaagtcaggcacgtagctcagcggcggccgcggcgcgtgcgtctgtgcctctgcgcgggtctcctggtccttctgccatcatg

SEQ ID NO: 13678 - DNA, 4505 bp, Homo sapiens
gggggcaccagtagaatggccaggacaaacgcagtgcagcacagagactcagaccctggcagccatgcctgcgcaggcagtgatgagagtgacatgtactgttgtggacatgcacaaaagtgaggtgagtcgcaggacagaagagtgctttttgtttcagcagagcagcctggggagagataaaagctactcctggggcctgggcctgcattcctgagatgtgggtaagaggggcccagggtcagagtgtctggcaagcttggctctgcccctttgctgtcctggagactagggctaatcctgggctcagggagtggcctccccatggttaggatacaagtgctcatcaagggccacccctaggaaggaccaattttcctatcagaagcttctaagttatcctcctttggcccaaagggacacctcaagcctactctgaggaactctttccaatgaactaattcctacagtcacttccccagcaacctgtgcctcagcctcaaggcactgtggggtaggcctcagtttgtggcctggacatcggactgtggaccagacgactcctcccgatttctgtttgttttcagtcctctgaccccaagctggctggtgaagtaggtagagggaggagactttggtgcatgcatacacacacacacacacacacacacacacacacacacacacacacacacacacacgtctcctgtgccccccagtctccatggctggtcaatgattgactggcatttcacaggccgctggttgcagccccagcctgttgacttagaggtcaccctcggaagctagagccctgtcctgcctcttcagtgtcagtggtcactccactgcccacaggctggggtcttgggcaaaacacacgcatctgccctgatctgagtttgctgccctctgtcccgcagtcagccccactctgttcccactccctctccccagccccctagctagacccctctcaccagcacccctttcccttccctgagggtccccctcgctgtctttgtccctcagacatcctctttcctgggctctcctgccaggccctgctggagggacagttaaggaggaaatcgaatcagcagcgcccacccctgccccccttcctctcctcttgtcagacaccagacgaggttttttcctctggcttcccagctctgaatgggctcattctttttcagaggctcggcccctctcgagcctcctccccagggcgtgagttctgaccccagctcctccccccatccccactccagccccctctccagcttgctccaccctctctaccgcccaccgggactgggcattgtctgccagtccgggtttcttcctgggatttgggatgcagagaggatgggtttgcttgggcgggggggtggagagtgaaggggggaagcaggatctttgtagagggagggacctacagttacctggacttctttcctctgtctcccctcttggtacccttgactggggctcttgagggtaatgggtgaagccaaatctgccatggctcagttcccagctcagctctgtgaccttgggaaagttcctttagctcgtggaatctcaaggctcaaggttcctcttctgcaaaatggggaatgataacacctgcctcctctggagtcttggggactcagtgttctgaggaacgtggctgtaggtcagagtggcacagagtagggtccaatgaagcatggcgtccacagtagctttcctgactggactaacctttccggacacaacagcagggcaggggtggggcctggggagaaaggacacctctaaccctgatcctaacatcccgatggcctctaaggctgcctgcacactcatccaggtgcaagccctccaaggtgtggtgtgatgaaccagtgactcctggagccaggtcagcgcatcctcttcccgcagggctgtaagctgcaggactgagaggcaggttgaccaggtcctgggctggatgatggggtgagagtaaggggtcagttttgatacatgcccaacttttctctctagccctaagacatcctgggcaaattgcttacctcagttcccctgatcctcaccctaaccctaacaccagctcaagagaaaatagggatattgatggccatccagaagggctgctgtgttccatacacagcaatatttctcgaatgtttgtgacagcggtccaaggaataagttaattttacattatcactctggatacctgtacaaaactccaccttatccttactatatgaatgtgctagggttgtttttttgttttgttttttttttttttttttgagacagagtttcgctcttgttgcccaggctggagtacaatggcgcgatcttggctcaccgcaacctccgcttcccaggttcaagcgattcacctgcctcagccttcccgagtagctgggattacaggcatgcgccaccatgcccggctaattttgtgtttttagtagagacagggtttctccatgttggtcaggctggtaccaaactcccgacctcaggtgatccacctgccttggcctcccaaagtgctgcaattacaggcatgagccaccgcacccagccgtgctagggtctttttctgttcaattcctttctctctcttgctctctttctttctttcaatggagtcttactctgtcacccaggctggagtgcagtggcaagatctcagctcactgcaacctctgccctctgagttcaagcaattctcctgcctcagcctcccgagtagctgggattacaggtgcctgccaccacacctagttaatttttgtacttttagtagagatggggttttgtcatgttggccaggctggtctcgaactcctgacctcgtgatctgcctgtcttggcctcccaaagtgctgggattacaggcatgagccgccatactcggccaactttgtattactttcttaaagagagtttcccaaattatataagcttcaggccccacaaaacctagatctgccccagtataactaaatctgggaccatttattgagcaattattatgtgccaagtattgcgctgagtgcttccagagcattatctcctttaaccccagcatagtatgtcagatgctgttttacagatgagccaactgagaccagagatgctcagtcacttgcccaaggtgacatgactgatatggaatagagtcaagatttttttttttttttttgacacggagtctcactctgtctcccaggctggagtgcagaggcgcaatctcagctcactgcaagctctgcctcccaggttcacgccattctcctgcctcagcctcctgagtagctgggactacaggcacccgccaccacacctggctaattttttgtatttttagcagagacagggtttcaccgtgttagccaggatggtctcgatctcctgacctcgtgatctgcctgcctcggcctcccaaagtgctggaattacaggtgtgagccaccgcgactggccagattcaagatttgaacccaggtcctcttggtcccagaggcccctgtttctcaactccctaggatggcatagcaacctgtcccacaagaggtgcctgctttaagtgtgctcagcacatggaagcaagtttagaaatgcaagtgtatacctgtaaagaggtgtgggagatgggggggagggaagagagaaagagatgctggtgtccttcattctccagtccctgataggtgcctttgatcccttcttgaccagtatagctgcattcttggctggggcattccaactagaactgccaaatttagcacataaaaataaggaggcccagttaaatttgaatttcagataaacaatgaataatttgttagtataaatatgtcccatgcaatatcttgttgaaattaaaaaaaaaaaaaaaagtcttccttccatccccacccctaccactaggcctaaggaatagggtcaggggctccaaatagaatgtggttgagaagtggaattaagcaggctaatagaaggcaaggggcaaagaagaaaccttgaatgcattgggtgctgggtgcctccttaaataagcaagaagggtgcattttgaagaattgagatagaagtctttttgggctgggtgcagttgctcgtggttgtaattccagcactttgggaggctgaggcgggaggatcacctgaggttgggagttcaagaccagcctcaccaacgtggagaaaccctgtctttactaaaaatacaaaaaattagctggtcatggtggcacatgcctgtaatcccagctgctcgggaggctgaggcaggagaatcacttgaaccagggaggcagaggttgtggtgagcagagatcgcgccattgctctccagcctgggcaacaagagcaaaagttcgtttaaaaaaaaaaaaaagtcctttcgatgtgactgtctcctcccaaatttgtagaccctcttaagatcatgcttttcagatacttcaaagattccagaagatatg

SEQ ID NO: 13679 - DNA, 14757 bp, Homo sapiens
agctggcagggcgaagggccgacaaatcctccctgaccctcccagctctttgttatctcagagggaaggttacatttctgtatgggaggcaaggtgccaggaggcctcgggcagaacagagacaggcagagctgctgtctgacccctgttgcctggagcagctcagggctgccctagggacactctccctccactggcctggggcccttccagaaatgggagggctacatttcagaaagagggcgagtagaggagtgggacagaaaaggagcgaggtgggctggaaggataaaagcagccaactctcaattattcagaaacctgtctgcagtgtgtggacagcccatgcctttgctgagtttctcaccttctctgttcagctgccatcagctctttccctgagaagtggaggagggaccctggcaagttggccacttgctttcattttggcttcttgataaatctatagaggatttttcagcagcaggcccatgtccctcaaccccaaacaagcatttagatcattatctttctgtttaaatcaagaacgcattatttagccttttatttggggttcaagatactcctacaatggttctaaatcataagaaaaaggggcttgatttaaaaccccttgttttgggccaggaatggtggctcacgcctgtaatcccagcactttgggaggccaaggtgggcagattacctgaggtcaggagttcgagaccagcctggccaacatggtgaaaccctgtctctactaaaaatacaaaaattagctgggcatggtggcaggtgtctgtaatcccagctactcgggaggctgaggcaggagaatcgcttgagcccagaaggcagaggtgagctgagtgagctgagatcgtgccattgcactccagcctgggcaaaaagagcaagactccatctcaggaaaaaaaaaaaaaaagaaaacaaaaaaaacccttttttgagaagaattacggagcaaagtagaaaaatagtagctgggtgttaacattaaatgctggatttttttcatggcttgtcttcccaatcatattccctcaaattgtgtttcctcctctggtaacccaggttggttatgcttagcaagtccatgaacaataaatatacatggaaaacctcctgtgtagaattggtcagacacctagataagatccttgccctaaagcagtttagaaaccagttagaaagaaagcagagtaaggaaaaccactaacaaagcacggtatcaactcagtggatagtcagcaagtgagcagggggtccagggactgacaaagctgggatgggcagggaaggcctcttgggggtagggtgtgagtatggccttcttacaagcgtgtgatgtgtagtaattaaaatgcaggaggcctaatgggtgggcagcttacataggagtataaaccaagcttgaccaggagctgaaaggttaaatggtggctcttaggggaaaaccctataaacagtggctgaagttcatttattcaacaaagatatgagttcttgtttctcattttttgttttgtattattttgttttgagacagggtcttactctgtcgcccaggctggagtgtagtggctggatcatagctcactgcagcctcaaactcctgggctcaagccatcctccttcttcagcctccacctccagctaatttttaaaaatattttgtagagacaagggctcactttgtttcccaggctggtcttgaacttctggcttcaagtgatcctcccgcttcggccacccaaagtgctgggattacaggcgtgagctgtaatttagttgtttatttactcatttgttcaacaaatacttattgaatatttgctctttggccagtcaagggatttcatgagtgtctactatgtgaataacactgtgttggccactagtctgtcacctactggtggattagaaaaatagcgcgaggaccattttttcttttcttttctttttttttttgagacggagtcttgctctgttgccaggctggagtgcagtggcacaatctcggctcactgcaacctccgcctcccgggttcaagcgattcctctgccgcagcctccccagtagctgggattacaggcaagcgccaccatgcctggctaatttttttgtattttagtagagacggggtttcaccttgttggcaaggatagtctcgatctcccgacctcgtgatccacccgcctcggcctcccaaagtgctgggattacaggcataagccaccgcacccggccaactcttttcttaaattagccagggaggcgtgggtgggttgggtgaggagttgggtggggggatctcattcagtattcaaacttctacaagtttcggggttgaggtgggtgatggtaagggaacaggccctgccactacctttcatagtgacttccatttgtgtaatatttttggtccactgagagctattattttatttgattcttatgaccatcttgtgaaggagtatcaacagataccccgttttgattttatcagatgcatgatttgtcctacatcaaacttcataaatgatggacagaatggaggaatccttcagaccaagtgctgcctacttcccaccccaatggtggcctcagcctgggctcacatcacacgccccaaggagccttggaaaaaataaaggctcttggctccttcctgggacagcgtgattcctcatgtctgagcaggcccatgaacttgtatttttcagacgttccctaggacccgtgtccatctggattagggaaccactacattataccacttcgcgggaagactcagggggaagcattttagccactttcctgtgttccacagtactggagggtgttctgagtgggctgtgattaatttccaaaccaaccacacgtctcccctcaactcccactgcttactctttgcttcctagacattcactgcaggctggagacttctggaagccaacagcatcgctgtagaatttacagggtccagttcccggtggaccacaaaacctaaattatgtggctggggaaagctgaaatccaagggaagggtttgaggaggggctgaccttataataaaaccggcttgtatttactaagtgttaactatgcgctaggccctcgttgacgcctcaactctatgtgaaaagcactattatcccccatttacagatgggaaaacagagatttagagcgcgaaaatcatttccccaaggcgcacagactccaaagcccacgctaccaggtacaacctcaaggctgcggcgtctcttcacctgccccctagcccccaaaccgctgctatgtctagggcctgacattccggcgccctctgggacgtgctcagatgcaggggcgcaaacgccaaaggagaccaggctgtaggaagagaagggcagagcgccggacagctcggcccgctccccgtcctttggggccgcggctggggaactacaaggcccagcaggcagctgcagggggcggaggcggaggagggaccagcgcgggtgggagtgagagagcgagccctcgcgccccgccggcgcatagcgctcggagcgctcttgcggccacaggcgcggcgtcctcggcggcgggcggcagctagcgggagccgggacgccggtgcagccgcagcgcgcggaggaacccgggtgtgccgggagctgggcggccacgtccggacgggaccgagacccctcgtagcgcattgcggcgacctcgccttccccggccgcgagcgcgccgctgcttgaaaagccgcggaacccaaggacttttctccggtccgagctcggggcgccccgcagggcgcacggtacccgtgctgcagtcgggcacgccgcggcgccggggcctccgcagggcgatggagcccggtctgcaaggaaagtgaggcgccgccgctgcgttctggaggaggggggcacaaggtctggagaccccgggtggcggacgggagccctccccccgccccgcctccggggcaccagctccggctccattgttcccgcccgggctggaggcgccgagcaccgagcgccgccgggagtcgagcgccggccgcggagctcttgcgaccccgccaggacccgaacagagcccgggggcggcgggccggagccggggacgcgggcacacgcccgctcgcacaagccacggcggactctcccgaggcggaacctccacgccgagcgaggtaagagccgcggcgcccccggatctggggcgggcttggcgtcccgagcggcccccggcgccggagcctcccggctgcgcgctttgcccgccgcagcccagccggggccggcgcctccctccgctcgccgcccgcccctttcacctcctggctccctcccgggcgatccgcgccccttgggtctcccctcccttccctccgtccgcgtctcctgcgccccctccctgcgctcgtcccgccgctcttcccgccgcccaacttttcctccaactcgcgctcgggagctggcgaggcggcggcggctcctcagtgagtcccgggagggacaggcccggggcgaaggcggcgaggcccgcggtttcctggactggggaggagggcgggagtgggcggcgaggtgggatgcgttgtgtgtgttatgtgtgtgtgttgcattccactccatgtctttttggtccccttttggggattcacccccaattcagcaggtagctttgggctcaacgctaaaaatccggggcattcctaagtccttttccacccccgggaaagcctggggtgcgggttggggtcggatggggtgggagatgaactgcggaggacgtggagggctaggttagcttctcttggaataggttttaaggaggtgtcgtcaccaaatggctgaatctgcttgagctgagagcgaaaaacgactcccctttccagaaggggtgatcttatgacttggacggtctctgaaagggtcggaagtttggggaacgggaggacaacccacggtcgttaagccgaggtgtgggatgggggcggaaggaccgttcggtcccaatctggttcctagaggtgggggaagggatgagggtttttgtccggtgtggttcactcggcagcgatgcgtatgcttctctggcccagacccctctgcacctcgcttcccctaccgttatgtttggggttgggagaaaagtgaggctacgacccatgtttgcggaggaattttatggaccttgtagatgggggttcatatagaacacacaccccctatgaggcagccagacacttttttggtggtggtggggggggggtggggtgtgaagcctgtttcttgttctgagcccagaagctatcaacccttttgaaaaacattaccacggtgcctttctcccccagcactcccccacccccaatttccagatgtagcagccgcatctggttccgtttcaccccacacgggtacaccgcagccgcattattaacttccctcttcctcccctccccctcccccaaattaaaactcagattcttcagcctgtcttgaccacctccctccttaacatttctggagacttggagatgcggcgttgagattcgggggagaaaagaaagttcccttggatcccgagttatttaagatctcaccaagttattcgccgccgctggtgggtggcggcggtccgggtgctttctggattgcgcagtaaagaggcatcttgggagatggggccaaggttttagggggtgccactcgcgaacggttcatccgctagactaggggggctctttggctgtgcgtctggccagaactggccttgacgatggaagtttctggaaccaaagcgttgctttctctcccttgtgttatagctggagctgcgggagcgcctgccctgcccggagcccgcggtcccctctcggctgccccgcggtggcgtcacgcgcccctcccggagcaagcccggtgcgcagggccgggggcgtgggcggctgctgccagaggcgctctctgtgtgtttttaaggactgatttgggccgcatcccccggaaactaaagtggggtgttttaccgtttaaataacggctacaggtttgaaagcggggttggattttcgagttgtgtttggtaatagtctttgaggcaggaaagcgccttgtggtccaaagttgccgggagggtggggagagtcggtgtcttacccgcttctttccagcctctttcaaattgaaaacacttctctggtttccttctttgggcggtagttttggaggctgtaatgaaatcgcactttctctagacgtggtaattaaggtgactgtttcctccgcagatgtgccctaccctttgcacctccggaccagcgctttttttggaatactatctagccttgagactgtttagcagaaagtggccattttcctcccttggcccgggctcccggtttcctccctgaggcttgtttaaaagcgaagtagcagggccccgtgggacgcgccttggtctgggtaatcacccccacgcccgggtcatccaccttcctctcggtgaccgaggttcagcagcctctgctattgccggccgtctttgccgatggcctgcctccctaatgacttgtttacatatcctacccccagtgggttaggagaagctccggggctgccccgaccctccgagtgcagggtgtttggggaccgggaggctgctggggcctgactccagctgggagggttatgaactgcatcagtgacgagctgcttgaaatatctgttgcatttactcttagtcatagctgagtgtcagctttttaatgaggttcatccagattgagagccacttggactgcgtacttcactgcctgcttttccaaacatgcctgcagaaatgctcattttcgaggtatttttcccaatgggaattcaggccagagtgggcaccacttgaacaatcttagggtgcttcttttccttggcctctggccatggagggtgttagacagttccattaggtggccctttgatagcaagggaagcaaaggctcaggaagaaatggagaagcgtcccccactccctaggggcagaggattagatacatcggtgcatccctcaggctgggctagctttattcctggtggactccagagggcaagaaaattgaattgaacactgggtaggcagattcaagccttagagaccaaggaaaatccatgggttttgcttttagtggtgtgctctttgttttcagtattgacctgaaacaagactcctaaaatgagagatttgctggtatgaacttgggggtttagcagccggcttctacaaaggcttttttcttgccttcgtttctaaagtgtctttcgtcaaaatggctgttagttatagaacatcctagcaaagtttgagcctgttgctgctggaggaaaaggagttagaattgattcaaatgtcttattctgaaagggcctcacatcacttgatagtttaatttcctcctgggaaatttgtgtcttacatttgtcttccccagagctttgtaaaaggcctgaacgcaccagggactagtgggagcccagatgcagagctttagagaagattctggtgtttccagagaggatgaaatgtcagacttgggctaggatatttgtttttcctcctaaggttgcatctactttaaacagaaattctctcctcgccaccatttatctctcccctgcaatgaaagaaaccatgtttagggccctctcccccatttaatagccctcacatggatgaactatcccaagaatttggtggggttccactcatagtacatcctgtcttcaagagcaaggttttctagattatgtgcagcagttcgtgtttcacttgttgctttttttttttttttttttttttgagatagtctcgctctgtcgcccaggctggagtgctgtggcgctatctcaggtcactgcaacctccgccttccggttgaagcgattctcctgccccagcctccctagtagctgggattgcaagcatgcgccaccatgtccggctaattttttgtgtttttaatagagatggtgtttcaccatgttggccaggctgggcttgaactcctgacctcaagcaatccgctggcctcggcctcccaaaatgctgggattacaggtgtgagccattgtgcctgaccacttattgctaattttttatatgtctcttacttccaaggacatttagacactttttttttttaaagagactcaaaaaattagcatttccattggaccaactaaaatttagcaagctgagctgagtaactttctccatatgtttattaagtacttgccccctgccctctcaacatgtgagtagagaatggtcactttggggaagaaataagtcttattctcatctgaagggattaatgttttggtgttacttcctcaattctgaagaaccaagttgtccagaaattttctcagggttctttggactagagtttggctggttaacaaggggtactacctaattgcttttctctgatattctcagcctctttttctggaggagtatctctgtcagtttcttttcatcagcccttttttttccttcattcacttactcattcatccagttaacaaacatgttggcatctcctgtgtacatgctaggtgccgagggtgttagcaaaggttagggaggcacagaccctgttctgaaggagcctgcagtttcgtggggagagaagagaatgaagaacataaataacaatcatataatatgacctaagtgctatgtgagaggggctagtaatgtggtttgcaaatttggaggaatgaaattctccagctagaaggcccaagaaagtcttatggaagaaacagcttcttaaggtggggttcagagaaaagggaagggctggcctgttgcagaacaaggaatggcatgaagaaagtcttgcacagaggcatggatgttgcttcgagctgtggcgccctatagaaatagaacatgagcagctggtcacagtggctcatgcctgtaatcccagcactttgggaggccaaggcaggcggattgcttgagcccatgagatggagatgagcctggacaacatggtgagaccctgtgtctaccaaaaaatacacaaattagatgagtatgctcgtgcttactggtagtcccggctattcaggaggctgaggtgggaggatcacttgagcctaggaggcagaggctgcaataagctgtgattgcaccactgcattccagcctgggggacagaggaagaccctgtttaaaaaaaaaaaaaaaaaaaaagccaggcacagtggctcatgcctgtaatcccagccctttgggaggccaaggcaggtggatcacctgaggtcaggagttcaagaccagcctggccaacatggtgaaaccctatttctactaaaaataaaaaaattagccgggcttggtggctcatgtctgtaatcccagctacttgggaggcaggagaatcgtttgaacccgggaggcggtggttgagccaagattgcgccactgcaactccagcctgagtgacagagcaagactccatctcaaagaaaaaaagaaaggaagaaagaaatataacattataacatgagttatgtatatgttcagattttctagaagccacattggaaattaagttaaaagaaagaaataggtaaaaaaaatttttttttttgagacggagtctcactttgttgccaggctggagtgcagtggcgcaatctcggctcactgcaacctctgcctcccgggttcaagcaattctcctgcctcagcctcctgagtagctgggactacaggcgcgcgccactgcacgcagctaatttttgtacttttagtagagacggggtttcaccatgttggccaggatggtgtcgacctcttgacctcgtgatttgcccacctcagcctcccaaagtgctgggattacaggcgtgagccaccgcgcctggccaatatttgttttttaattaacttgtttgtttagattttatttaatgtaactatatttccaaaatattatcatttgaacatgtaatcaatatagaaattattgatgagatactttacatttttttcataacaagtttttaagatgcggtgtatactttttacttatagcatatccgttagcaccagccacatttcaagtgtgcagtggccactgtgtgggccacaggtctagaatataagacatgaagatggagagtgagaaatgcctttggaaaggttggaagttcctgtccttctgctgccaattaccaaatctcctgagagtgctattaaggagtgactcaaagcactacacaaagagaattataaatatcttaatattatatctgaaatccaaatgcataattctttacatttggttggtactttagagaggagagaatgggcacagtcacccacaccacccatttgagcctcataatcacctgtgatgtggcttcctctaggtgggaaaccgaggcttagaacggttaagtgactatcccagggtggcaagatcataagtggaagggtgtgaattcatactgtctccagcggacaagaataaaaagacccaggctgggtgtggtggctcatgcctgtaatcccagcactttgggaggccactgtaggtggatctcctgagcccaggagttcattaccagcatgggcaacatggtgagaccccatttttattaaatatacagaaaattagcccagcttctcgggaggctgaggtgggaggatcacttgagtctgggggatggaggttgtagtgagttgagatcgtgccactgcactctagcttgggtgacagagcaacactctgtctcagaaagaataaaaagatttggccatgaattcgtcagctagttttccttacataatttttggacaaggagatctgacattcataggtttttctcttagaagtgggagagcttcaaggtcacgtggtccgtccagcccctgctatctcaccagacactgtccaccctgtatgttggatcagtactccagtgagaagacagcaggcactttcacccatgcagcccattcagtcttcataaccacctgtgatggaggcaaggcaagtatttcagccccctctgatgagtgggaaactgagatgtgccccctctctgctccccaccgaggacctctgcatgcaggcatgaatcccaggagcctagctgatattggagagacggggcggggggaaccagctgcagggtcttggaggaagctgctgtgtacacctgcaaggctgcaggttacatctatctgtcaagcagtgaaggaaggaagttgtttctaagggattggaaaaattcattaattagtagaatgagaaactgaggtgaagcaggaggtggcagggtcccagacagcatgttggactagtggcctgtgtcactgtgttttttgcaggcgggtggcatggggtgtatgctgacttcttattccaggagttggtgccaggaggccaggttttcttaacatccttgttttacagatgtcaaacttgagggccagaggggtaggagaggaagagactttttgtaccttttttgggaaagaacaagagggaagctggcagatgaatttgaagtgcattgaccagggagctgagagagggcggtctgcagccagcccacacctgggaggaggcggcaggcttttctggggacagagtggccaagtcgaagcaagcttaaccatctcaacatgacaccactctttcccattggaacctgagaacttgttcagtattctgacacttagcaagggacctgggttttcttggtcaggtgtgcgtttctgggtgacaggcctgcatcaggtgtattttcgggatgtagtaagttgtggaatatgggtttaggggcatcctctggcaagcactgcttctatcccagctctgggaatgtgccccatgcagtgtcctagatggcccatctgtggtctgcttccaagggtctttcttttagttagttagttttgagacagagtctcactccgtcacccaggctggagtgcagtgatgcaatctcggctcactgcaacctccacctcccaaattcaagcaattctcatgcgttagcctcctgagtagctgggattacaggcgtgcaccaccacacccagctaatttttgtatttttagtagacgaggaatttcaccatgttggccagtctggtctcaactccccacctcaggtgatactcccgcctcagcctcccaaagtcccgggattgtaggtatgagccaacatgccctggcacaagggtctatctttgaccaatggaactgcaaatcaagcctcttttgttaccagagttaccttggatttacccttatctacttggtttggataaattgagtttgcatcagatggagtcaggcttgatcaatcccttatttacttcctcccaccctgttctctaatatccaaaaaccttgaggcactattacatgctagctacatttccttgagtaaagtacttaacctctttgagcctcagtttctccattgcataaaaggaataataaaacttatcccccataagtttatagtgaggaatgaattaattcctcactatagttctaaattaattctacttagggcatccttggtacatagtgggtgttcagtattcatttcattttctcttttctgattcctttcgtaaaagtagaaaaatgaaagagaaatgttgacttctcttttgatttgaaatcattaaaacattttagtaagccttgggagggagctagtggtgtggcatgtgtatcccgctggccaagcacatgtgaacgaagccaagaatccaggggcttttctgccagccagcactgactcacttgcgaggggccctgcctggctcgggggaggcagggctgaagtaccacattagggcatgttccggggaagtagattctctgaataacttggatggctccctggagcatttaggacagaagccacctggaaaatagagatggtcacccccacgtagccttgacagtgcccagaaagtcttgtcacttggtaaatgttaacagctatgatccgttctttaagaccctggggagttttaagttttaccccaccagacctgagaagggtaaagggctgcagattctgttcttttaactggggccagtgtgagccatctttgactcagtgcttgcaatagaccttgattctgcagtgggacctcccaggcccccttgccccccgcaacttctggactcatatccgtcagacatcacttgtcaccttccagcatcagggagaactggatccctcctggctccacactcttaggctctttgtaagtagctggtgagggttttcttctctctgcaagggaggctggtagaactatggatgtgattcgtacaattttagagacaaaaagaaagtacccaggaggtcatttatttcagctgcttcattgcataggtcggggagttgagcatggagtccagcagctactaactagttatctctgtacctggcttccatttactggtccttagcttgttccgtgattcttcattgccccttatttctcaccagagggactggttggccctagatggagtggtctttttaaaattttttttttaaattttttgagacagagtctcactctgtcacctaggctgtagtgcagtgctgcgatctcggctcactgcaacctccgcctcctgagttcaagcaattctcctgtctcagcctcctgagtagctgggattacaggtgtgtaccactatgcccagctaatttttgtatttttagtagagatgggatttcaccatattggccaggttggtcttgaactcctgacctcaaatgatctgcccaccttagcctcccgaagtgctgggattgcaggtgtgagccaccgcacctggcctgggcagagtgaagtcttatgctggggagccatcagcatgctcaaacctcctgcaattgtagcacactttgtaaaactgtttcccacaaaagggcagaactatttgggactttcatgagaccattcactttgtagcacatactactttgaagtttataccttggaaaacctcatgatggtattcccaggcttgcacgtaatctgcactcaaaacatagctgtagaattgaactaaagcatccctctgtccaattaagacctataacctctctttttgagacagaatctcgctctgtcacccaggttggagtgcagtggtgcaatctcagctcactgcatccttcgcctcctggattcaagcgattctcttgccttagcctccgaagtaactgggactacaggtgcgcgccaccacgcctgggtaatttttgtatttttagtagagacggggtttcgccatggccaggctggtctcaaactcctggcctcaagtgatcctcccgcctcagcctcccaaagtgctgggattacagggtgcaccaccacacccagccaggacctatgatctaattcattgttggggtagcttcacaattttcttctggacgccttagtaagtccacactttaagcagccaccacatggcatactttaccttctgtttttcctttcccctcccctacctagaccctcctaacttttggggtttttttcctttcctcagggtcagtttgaaaaggaggatcgagctcactgtggagtatccatggagatgtggagccttgtcaccaacctctaactgcagaactgggatg

SEQ ID NO: 13680 - DNA, 24 bp, Artificial
  Synthetically generated peptide
cgattgccgcccaactctgctggg

SEQ ID NO: 13681 - DNA, 25 bp, Artificial
  Synthetically generated peptide
cgagaacatggctttccagcgtctg

SEQ ID NO: 13682 - DNA, 22 bp, Artificial
  Synthetically generated peptide
tgtccacctgaacacctagtcc

SEQ ID NO: 13683 - DNA, 4743 bp, Homo sapiens
cctcccaaagtgctgagattacaggcatgagcaaccacacctggccgatacatacctatattaaacattagtatgttcatgttagaataatgtaccttttgaatttcataaacttggagaatatttatattgatgatggatgaaagaactttcttggatggatgaagagagtaacgctgtgaaacaaccagcaggtggcgaaaactggcaatcaaaagctttttgtttggtggcctggggaatgaagacggaaagaaaacacaggccattcagactcttgatacaatctccattccctgcatcttgttttttttctcttcctggtgccacgctacttgtagaatccaaccaggtaaagctgccaaaagggtcatccattggctcttacaagtagaaaacatcttggaaagtgaaaagtccactgtgcatatgtttgtaaggttgttggaaggtctcaggcatagatctaggattcaaatccagttactcctgcctcaggctggtgttccctcccccacctcagcattgcccaaagacgagtagtcaatgtcacatacttcctgggaatacttgcccttatgctttaaaatggaatctaataaacatggaatctgaacgcaggaatggtttcactctttcatttgaaagagtatctagaacattcccagggaaaatataacccctagccaaagactgcaatacagacctgtctcaagactgattatagccaagatgccacataaggaatcagtctgggaaaatccatagagtgaggctctgtgggagcaaaggaagacgaaaatcagtcagcttttctttctctggaagtaggggatccgtttccttctggctgccccctttgcagaagtacagtttcttttgcaggtttgtcctatcatttcctcactcatatgctgagtattaggagcttgaagcctttcaattcctcttaggtaattttggggctttaaaatacgctttcaagatttctaaaccatactgttgtgcaattggtatgaatttatgtgagaacatttattctaggtcaatctatacccagtgtctatccagaccaaaacacctcccacgcgcataaaagggactctgtcccaaccatcagaagggcaagaaggaggatctcctttcatcccctcttgcctggataagaaatttgtacccaggcccccattcctatgtgagagaagttggcttgttgggctgatgggatacaataaatgaagaaataaaataaaaacacccaagagagatggcagtgcgtatagtcccagctattcatgaggctgaggtgggagaatccttcgagcccagaagttcgagtccagcctgggcaacatagcaaaagccatctcttaaaaaaaaaaaaaaaaggccaactaagtaaaaattaaaaaaatcataatttggtgtgcttttctggctttttaaagaatgttttgattttagagtaggaatgagacaaaataaagatgtcaggcagggcacagtggctcatgtctgtaatcccagcactttgggaggctgaggcaggcggataacgaggtcaggagttcgagaccagcctggccagtatggcgaaaccccgtctctactaaaaatacaaaaattagcagagcgtagtggcgtgcacgtgtaatcccagctactcaggaggctgaggcagaattgcttgagcctgggaggcagaggttgcagtgagctgagatcgcaccactgcacaccagcctccaagatacaacagagcaagactctgtctcaaaaaaaaaaaaaaagtcatagcatatttgtacacattgtagtactcatttgtcatctttcttgaccccaataatccagtgtccctatatatttgcactcgagccctattaagtaagccgctgtgcttctagaagacctttttcttttcttggtgctttgtcaaagactcttggagataaaaatacacacgtgcaacttgtttgtcctcttgtccttttttgctaggggctattcatgctgattaatttaaaactgtctgcttgcgcgtacacacgtctgcgagtgtgaatgtgtatgtgtgtatctatgtacctcatttgagaaagtgcggccaactaggattggctacgaggcaaaggtggagacctttaggagcccacccaccccagcgttaggacggtgggcctgaaagttactatatggaagtcctcatcgtgtagcactaaaccagtgtaaaaggtgttagggacagagggaaaacattgacttaaactgtcgtaaagcccttgataaaccccttccctggagcgctgagttctgcatggcctgggccacggactaggtgttcaggtggacacgggcggggatgcgcgtgcgtgtgtagtgcgcggacacctaggaagctacttgaaagtaaacaccacgctcggggcgtccctagacattgcttaaaacgtgcagagtcacctgtcttcacagcagggcagcgctgaggtcccactgctgggggcggtggggggcggcattggcctgggtcttcccccggcggccgagcgccggtaacacaacgtgtgtgtgtgtaggcgcgtgtacacactctcatacacggctagaaagggtccaggcgacacacacactcccacatacacggctagaaaaggtccaggcgagacacacacacacacacacacacacacacacactccacacacactcacacggccagaaagggtccaggcggttcccggcgcttttccagcccttgttttcatggcgcaccctcccgccagccgcccccctccgcactccgtcgtccgcccggcccggccgcgtgcggttccccgggagcccccaccccgtcgcggaccccagcgaccaccaagtccgcacgcggcctgccgcaggcctgagcagaaggccccgcgcacacccaccgcgccgcggccgcgcgggaggcctgtgccgcccgcgccacccactggccgggccccgcgggcgcagcggagcgggcgggtggccggcccggacgcgccctccccggccgcggccccgcgcgccatgtgcccccggcgggacgcgccactcccgggcctgccgcggcgcctttaacccgggccagggagcggggcggagggggcggtcgggtggctcagaggagggctctttctttcttctttttttgaatgaaccgtgtgacgttacgcacaggaaaccggtcgggctgtgcagagaatgaagtaagaggacaggcaccacagccccgctcccgcccccttcctcccgcgcccgcccctccgcgccgcctgcccgcccgcccgccgcgctcccgcccgccgctctccgtggccccgccgcgctgccgccgccgccgctgccagcgaaggtgccggggctccgggccctccctgccggcggccgtcagcgctcggagcgggctgcgcggcgggagctccgggaggcggccgtagccagcgccgccgcgcaggaccaggaggaggagaaagggtgcgcagcccggaggcggggtgcgccggtggggtgcagcggaagagggggtccaggggggagaacttcgtagcagtcatcctttttaggaaaagagggaaaaaataaaaccctcccccaccacctccttctccccacccctcgccgcaccacacacagcgcgggcttctagcgctcggcaccggcgggccaggcgcgtcctgccttcatttatccagcagcttttcggaaaatgcatttgctgttcggagtttaatcagaagaggattcctgcctccgtccccggctccttcatcgtcccctctcccctgtctctctcctggggaggcgtgaagcggtcccgtggatagagattcatgcctgtgcccgcgcgtgtgtgcgcgcgtgtaaattgccgagaaggggaaaacatcacaggacttctgcgaataccggactgaaaattgtaattcatctgccgccgccgctgccttttttttttctcgagctcttgagatctccggttgggattcctgcggattgacatttctgtgaagcagaagtctgggaatcgatctggaaatcctcctaatttttactccctctccccgcgactcctgattcattgggaagtttcaaatcagctataactggagagtgctgaagattgatgggatcgttgccttatgcatttgttttggttttacaaaaaggaaacttgacagaggatcatgctgtacttaaaaaatacaagtaagttctctgcacaggaaattggtttaatgtaactttcaatggaaacctttgagattttttacttaaagtgcattcgagtaaatttaatttccaggcagcttaatacattctttttagccgtgttacttgtagtgtgtatgccctgctttcactcagtgtgtacagggaaacgcacctgattttttacttattagtttgttttttctttaacctttcagcatcacagaggaagtagactgatattaacaatacttactaataataacgtgcctcatgaaataaagatccgaaaggaattggaataaaaatttcctgcatctcatgccaagggggaaacaccagaatcaagtgttccgcgtgattgaagacaccccctcgtccaagaatgcaaagcacatccaataaaatagctggattataactcctcttctttctctgggggccgtggggtgggagctggggcgagaggtgccgttggcccccgttgcttttcctctgggaaggatg

SEQ ID NO: 13684 - DNA, 23 bp, Artificial
  Synthetically generated peptide
cctggcacgtgtccctggtcaag

SEQ ID NO: 13685 - DNA, 20 bp, Artificial
  Synthetically generated peptide
ctggcacgtgtccctggtca

SEQ ID NO: 13686 - DNA, 20 bp, Artificial
  Synthetically generated peptide
tggcacgtgtccctggtcaa

SEQ ID NO: 13687 - DNA, 20 bp, Artificial
  Synthetically generated peptide
ggcacgtgtccctggtcaag

SEQ ID NO: 13688 - DNA, 20 bp, Artificial
  Synthetically generated peptide
gcacgtgtccctggtcaagt

SEQ ID NO: 13689 - DNA, 20 bp, Artificial
  Synthetically generated peptide
cacgtgtccctggtcaagta

SEQ ID NO: 13690 - DNA, 20 bp, Artificial
  Synthetically generated peptide
acgtgtccctggtcaagtag

SEQ ID NO: 13691 - DNA, 20 bp, Artificial
  Synthetically generated peptide
cgtgtccctggtcaagtagg

SEQ ID NO: 13692 - DNA, 20 bp, Artificial
  Synthetically generated peptide
acctggcacgtgtccctggt

SEQ ID NO: 13693 - DNA, 20 bp, Artificial
  Synthetically generated peptide
tacctggcacgtgtccctgg

SEQ ID NO: 13694 - DNA, 20 bp, Artificial
  Synthetically generated peptide
ttacctggcacgtgtccctg

SEQ ID NO: 13695 - DNA, 20 bp, Artificial
  Synthetically generated peptide
tttacctggcacgtgtccct

SEQ ID NO: 13696 - DNA, 20 bp, Artificial
  Synthetically generated peptide
atttacctggcacgtgtccc

SEQ ID NO: 13697 - DNA, 20 bp, Artificial
  Synthetically generated peptide
aatttacctggcacgtgtcc

SEQ ID NO: 13698 - DNA, 20 bp, Artificial
  Synthetically generated peptide
aaatttacctggcacgtgtc

SEQ ID NO: 13699 - DNA, 20 bp, Artificial
  Synthetically generated peptide
gaaatttacctggcacgtgt

SEQ ID NO: 13700 - DNA, 20 bp, Artificial
  Synthetically generated peptide
ggaaatttacctggcacgtg

SEQ ID NO: 13701 - DNA, 20 bp, Artificial
  Synthetically generated peptide
aggaaatttacctggcacgt

SEQ ID NO: 13702 - DNA, 20 bp, Artificial
  Synthetically generated peptide
aaggaaatttacctggcacg

SEQ ID NO: 13703 - DNA, 24 bp, Artificial
  Synthetically generated peptide
cacgtgcggcctgtcaagagatga

SEQ ID NO: 13704 - DNA, 20 bp, Artificial
  Synthetically generated peptide
acgtgcggcctgtcaagaga

SEQ ID NO: 13705 - DNA, 20 bp, Artificial
  Synthetically generated peptide
cgtgcggcctgtcaagagat

SEQ ID NO: 13706 - DNA, 20 bp, Artificial
  Synthetically generated peptide
gtgcggcctgtcaagagatg

SEQ ID NO: 13707 - DNA, 20 bp, Artificial
  Synthetically generated peptide
tgcggcctgtcaagagatga

SEQ ID NO: 13708 - DNA, 20 bp, Artificial
  Synthetically generated peptide
gcggcctgtcaagagatgag

SEQ ID NO: 13709 - DNA, 20 bp, Artificial
  Synthetically generated peptide
cggcctgtcaagagatgagg

SEQ ID NO: 13710 - DNA, 20 bp, Artificial
  Synthetically generated peptide
tcacgtgcggcctgtcaaga

SEQ ID NO: 13711 - DNA, 20 bp, Artificial
  Synthetically generated peptide
gtcacgtgcggcctgtcaag

SEQ ID NO: 13712 - DNA, 20 bp, Artificial
  Synthetically generated peptide
agtcacgtgcggcctgtcaa

SEQ ID NO: 13713 - DNA, 20 bp, Artificial
  Synthetically generated peptide
aagtcacgtgcggcctgtca

SEQ ID NO: 13714 - DNA, 20 bp, Artificial
  Synthetically generated peptide
caagtcacgtgcggcctgtc

SEQ ID NO: 13715 - DNA, 20 bp, Artificial
  Synthetically generated peptide
tcaagtcacgtgcggcctgt

SEQ ID NO: 13716 - DNA, 20 bp, Artificial
  Synthetically generated peptide
ttcaagtcacgtgcggcctg

SEQ ID NO: 13717 - DNA, 20 bp, Artificial
  Synthetically generated peptide
cttcaagtcacgtgcggcct

SEQ ID NO: 13718 - DNA, 20 bp, Artificial
  Synthetically generated peptide
ccttcaagtcacgtgcggcc

SEQ ID NO: 13719 - DNA, 20 bp, Artificial
  Synthetically generated peptide
tccttcaagtcacgtgcggc

SEQ ID NO: 13720 - DNA, 20 bp, Artificial
  Synthetically generated peptide
ttccttcaagtcacgtgcgg

SEQ ID NO: 13721 - DNA, 20 bp, Artificial
  Synthetically generated peptide
attccttcaagtcacgtgcg

SEQ ID NO: 13722 - DNA, 20 bp, Artificial
  Synthetically generated peptide
aattccttcaagtcacgtgc

SEQ ID NO: 13723 - DNA, 14776 bp, Homo sapiens
tgattgtggccaggcactacagctcacacctacaatcccagctactctggaggctgaggtgcgaggatggcttgagcccaggagttcaagaccagcctaggcaacatagtgagaccctgtctctaaaaggttttctaaaattagccaggtgcatatgcctgcagttccagattctcagaagccagaagtggggaggatctctggagttcaggagtttgggaccacggtaagctatgattgtgttactgcacaccagtttgggtgacagagcgagaccccttctctcaaaacaaataaataagattgtggtgatagctatacaaccctgtgaataactaaaaattgttgaaccatgcactttaagtgcatgaattttatggcatgtgaactttatctcaataaggctgccattacaaagctaaaaagggaggcaggtgcatgagcacatatatgtctaatattagctaaaatagtatcaccattattaaataaacttttaaaaaataccttctttctgagaatgcaattcttccttataatcagaaccatgaatataccaggaaactttttaaatcagggaacaaatgcctacgaaggacaggcacaagccagaaagggactatggatgaattaagtgggctgagcatatgggagcggtggagactggggcaaactgaacagctcctggcccttttaaaagaaatcggctgctcctcaacttccatccacttctgaatgcagttccagaattaccaaatctgcctgtttaaggaaaggcacaaattcagattgttaatgtgaaatctattgacttgtaagtgttggcacctatttttaaatgttataaatgctgagagggtcaaaacctgtcatccaagccaacctaccagtaagcaagacttggtcctcaagcaagtttgctgcctctgctttgagtactttagcatgactttcaaaacctcccacctccccctcgccctgcctaaacccactttacccctcaccaccactgcaagaagttatccaagctatgaagagagacagaagaattcatacataaataaagagtcccaaaacattctcaaagatgccaaagtcaggctagggtggcatggagagggagtggggcataaagtttttgattcctaatctaattagagagccctataacagattctttgttcaaagaccaaatttaatttacaattttatatctccagtgaagtcagcttttattaatttccagcacaatatttggatatactggccagaacttcaatgagttcctatttagtgtttaatcttctaatgcattccaattaattatttcagttttatggcaaactgtcttcagccaacatccaagctggacaccccatgcctctccactcacccaaaaaaccagctcgggaggtgtcaatataatgacttaagatgctgaatggtaaaggacaggattggaaggaaattgcgcctgcaattatgcactaatgcttcaccagagaagcagatggcattccttgcataaattattatttatccttggaattcccctctgcctattaccaaatcaacccttgaaaacaagtctttgttgggtctgtgaagtcccctggccagtttccaatgtctgctccctccctcacatcccaccctccagagctgcagcgagggtaagaactccaacatggcccacaggcaagggtttccgaaagcatcgacgttctaaatacatttggacggaggtgcacagaaaggagtccgctttattttgcagactgggaatccagatgcaatgaccacaggcagaaagcatggagcagaacctcccagcctcggctgtacccccagtgataaggcttgccacgtgtggacgtcaccaggttgcccaccacagcacggggcttaggctgtactgtgcattctctcatggaatccttgaacaaggattgaggtgggcaatgatgttccactttgaggaaatgaaatgaagaaaccagagactctgagacaaagaaaagggctttgggtttttttgtgttttttggctttttatttatttatttattttgtacagatgaggtctcactttgttgcccagattggtctcaaagaatggtgctttggattagatcttattgtgatgaaaaataaaaaaaaattaaaaattttttaatttaaaaagaatactgctttttttttttttttttaacagggtctctctctatagcccctctctatagagtgtacagtggcacaatctcagcccgctgcaacctctgcctcccaggttcaagcgatcttcccacctcagcctcctgaatagttaggactacaggcatgtgccaccacgcctggttaatcttttgtagagatggggtttcgccatgttgcccaggctggtcttgaactcctgagctcaagcgatctggccacctcagcctcccagagtgctgggattacaggtgtgaaccaccatgcccagccagaacactgttaaccttaacatcaacaggcagctaccattttcgagtgcctgcaatgtcatttaacctttaggaacagctctgggagacagctatagttgttgccattttctgcagattgagaaactgaggctcagttaagtgacgtaattctaaggcaccacacccagtcaagcgcagtgacagaattcgaactctggcttgtagggattcacaggactgccaaagcttacgctaacccatttcttctcctgtgcaccatcattgcctcattctctgccctcattttctttatttatttttatttatttatttttctttttttgagatggagcttcactcttgttgcccaggctggagtgcaatggcacgatctcggctcactgcaacctccacctcccgcgttcaagagattctcctgcctcagcctcctgagtagctgggattacaggcatgcaccaccacgcccagctaattttgtatttttagtagagacggggtttctccatgttggtcaggctggtctcgaattccctacctcaggtgatccacccgcctcggcctcccaaagtgctgtgattgcaggcgtgagccaccgtgcccagccgctctgccctcattttctccccaaaaccaaagtctactttacaagcacagatattactaacttgtcttacgaaactttccagaagaaagagaaagaatatatgttttaccaagccccttggaggacaaggatttgtttctgtatccactgtctcgatactcatggtgccttttaccccttggcattatgccccaggaaagtggcaaaagtaagaggtaacctctccttccttccttatttccctaaggaaatttgctctggtcaccagcagcagagaaatagaaagcgccgggcacctggctcgactggggcagtgacagggcagaggcggcccaggttatggtatcaaaaggtttctggtgctgaatctcatgactactattcaccgtgtgagtttaagcaagtccctgcaacacctcaattttccccatctgttaaatggaattttaacctacacctcctaggattactatggagatttaaggaggcaatgcagtggggctttctaacctttttaactcactgagatacatttcccgtatcgtccaagtgcagacacacacacacacacacacacagagagagagagagagagaaaagaatacttcatctgcaacacactttgatattttctgtgccagcccattttgtgaaattgctcatcatgattcattaaattcatttcttatttactatttttaaatttttatacatgcagggggctcaagtgaggatttctttcatgtatacattgcatagtcgtcaagtctggtcattaaatgtattcattatccaaatagtgaacattgttaaattgatttcatgatccactaaggggtcatcatttgccattttaaaactctgacagtatgagcttctccctagcccagttcctgttaccatcttcccattcttcccttccttcttcaattcagataggattttcctccagagggattataaagttgcgaggaaagcgcctgcagggggtgctgttccacactgttgttgaagtgtggtttggtttttatttcgttgcatttgcttttcggtcaatgagggcaattcatctggaatgacccccatcctcgtcacccttgctccaacgatgttggggcccagctcatcaacaaggacacctgaacagagccctacccattgatggaaccgaagcaagggcaaggaagagttctcaacccttctctctatatacgattaaaactgggttaggctaggtgtgccctcagctcagaagctctctctaatagcattccttcactaagcacttacagagtgcctaccacgtgccaggcattgtgctgggctctggagaccacctactctgtgaatggcaccttgaggcttgatgggtgagaacgcgagtaaaacacaatccatactgaccccagaagcttctcctcaaggaatcagacattaaaaagcacaaaaactataaagttgattttttttttttttttttttttgagacaagagtcttgctctgtcacccaggctggagtgctgtggcaccatctgggctcacggcaacctccaccacccaggttcaagcaattctcctgcctcagcctctcgagtagctgggatcacaggcatgcgccaccatgccccgctaatttttgtcatttttagtagagacagggtttcaccatcttggccagactggtctcgaaattctgacctcgggtgatctgctcacctcagcctcccaaagtgatgggattacaggcatgagccgctgcatctctggccaaaacttgaatgtttgtttgttttgagacaggatctcactctgtcatccagactggagcacagtgacacaatcttggctcactgcagcctcaacagccacggctcaagcaatcttcctcctccacctcagttttccaagtagataggattacagccatgaggcactgcacccagctaattttttttttttaatttttttgtagagacagggtcttactgtgttgctcaggctggtctcaaactcctgggctcaagtgatctgccggccttggcctcccgaaatgctgggattacaggtacgagccaccacgcctggccaaacttgtattttctaagacagaagaatgaggggatggtttaaactctcaagggaaggggaaaggatcatgaaaagctcctacaggaagatgcttgagttggattactaagacatatgagcagagatggcaggctggcagcctgagggccacctctgcccatagacatgctttgcttctccatatcattttttttcccaacacactgctgctggcttgaaatctccatataattcttacaataagttgttaacattttaaaacctggatttccaccttccctgaaaaactggaagcatttccacccatgggcccatatttcagggtaaccaccagagcaggtgccaaatgggagccaccagacctacacaggcaaatgctctccagtttaccagtctccaccactccctattgtattcttcgtttacatttcctgccaaacctctgtaagcatctgagttggcaacccttgatgtgttagcggaaaatgtggatcagaagttagaaagagtttctaaacctggttgttgatttacgctttatgctttgaaggaaaacagtttttccaatgcccagatccactcaccaagacaaaaaaaaaagcaagctgtagatttcagtagcagccttgtctagccagcaataaaggtgccctgggtttccaggaccacaccccagggattagccccggggcatcatatgaattcagtgaaaggcgggaaatcctaacataaagcgttgattcgtattaaataggaacaatgcctaattctgccttcctgaacttccagaattttgctttttctgaatagagtgatctgcaaaacagcatacacttggaatagtaagtcgtgcaagagttggagacaggaagggggtgggtttggaattgtctccaaacattagataatctctttgtgattctaaacctcaacttgacaagcttgtattagtccacaatttttcacacttgatgaagtgataaaggacatcaatttcatggaactcactatgaaacaccatgcaatattgatacatttaacttaaaacagctcaatacataactttctgctaaatctggaactcacattaacaattgctaacatttgctgagtgtgggccagacagcaggctctgtgctgaatgccttatctcacttaattcctgtaacaccttcaataagataggtgctacaattatagtaatcccattttacagatgagaaaagtgagattcagagaggtcatgtgacttgacagatttatcaggtgatcatgacagagtagtcctccaaccaagctgattcagcaacccgtccttatattctagattcttgtgtagccaaaaagttattgagaaagtctgcccattgacttcattctcttacccagtgtagagtcagcatacattcattcacattaactatgggccagacttgattcctggccttgggacttttttttttttttggcaggggctgataacattctattttatttatttatttatttctctctcttttcttttaattatactttaagttctgggatacatgtgcagaacatgcaggtttgttacataggtatacacatgccatggtggtttgctgcacctaccaacccatcatctacattagatatctcttctaatgctacccctcctctagacccccgggacatttataatctcatgaagaagagaaaaaggaggcctttctctgacagctagaaaaccacagttagtctattttagccggagaccctggattctaccctgagaacaaaggtttatgtttcagcagcttaattagaggttttccagaactttttctggctccatgcttttatgattctgtaagatgatcatgggaaaaggaagagtccacagagaaaatggggcttgaacttgggctgggaggaaaggtggttcttagataaatcaagaagagaagagacagtaagtctggggaactgcctgaaccaaagtgctgaggtggaaacttgtgtgtcactcagagtggctgtaaatagacctgtttctctgaagtgcagagttggtaagaaatagggtaagataaggaggaggccagatgcatgagggcttggaattccaagctcataatggagaacctcattttggaccatgggggtcaactgaagaattttaaatgaagaggaaaattaatcagtgtgcaaggttaaatggagtggcagagactaggagctattaggaatctactgcaagatgattctaacagccataggtagtgggtaaaagaggaaagtgagccaataagggaaacagaagaacaagttgaatatgtgggaatataatcaggagaatgtggagtgaacccagggattctcaacctcagcactggtgacattttgagccccactctctgttgtgggagccgtcctgtgcaatgtaggacatttagcagcatcgttggcctctacccactaaaaacgccaagtagtaaggccccatcccttagtgacaacccaaaatgtctccagacattgccaattgcctctggttgagacccactgatttatggaaatcaaaagaataatcatttccaaaagcctgacagcaaacagcaaagtccaaaaataaaatgagaacaagaccattggctttggtggttggaggtcatgagataccttcaagaaagcaccctctataatatcaagtccatgtagaagacgttacagaggaaacaaacaatataaaagtgaaaacaaccaagggtgagctactctcagaaagtatgcctttgaaaagaaagtcagaagccatagcttgggatctctgcagatccctaaaagaatagattcctattctactgactttctatgaagatcaaattgtaaaaagcaaaagtttctctccaagggtttcctttgcagtgacctgtatgtccaaccacgcaagggcccattgtggggacatatgttgtccaaaaggaccatagcagagacaggccagtgagccaaagtgtggaaacttttgagactggcttgagcttggcacttatagaacaataaaccaagcctttgaaggggttcaacaaaggaaccatttgtccactctagtagctacaaagtaaggcagggttgcagcaaagaacaaaaaaataaaagaaggccaagctggaggtatgaccaaagtttactaggtccattctgagaccttctgctagggtctgagatctagaagacagtgaataaggaaacaaacccaaaactcaacgcaacacaggatatggaagctctcaggcctgacgttaacagcatctactatttttcttctcagctactttaatgaatgcagtatactaaaagccaggaggggaagggacaacactaagcaaaaaacatgcattttttaaaatgcacagattttcttcactgccgtttttgttatcattcctatgaattagtgatgccgaatttcattttctcatctgctgaagagctttcctgtgttcctctcgttggaacacatgcttggcattaaaatgcttgtgagaacttctcttcctttaacgttccctggctagcttggtttttaatctaacagcccttctttcaaaatgatccttccactggagatagatatttatcattctcttccttcacctcatctcttgacaggccgcacgtgacttgaaggaatttttcaaatagcagctcagccaccctgaggggcttcagtctcacccctaagttcgctggctttttcttcaccacgtccagttgctttccatcttattaactgctcttttcactagaggaccaactcagtaggaaattttttgagaggtggagaaagagatgttcaaagaaggtgttggggtcgggggaaactggttttattttatacaagtcacacattctgaatcttcccttttgtgtctctggggagaaaggagaaagtttgatcaaatcgctcattatttctgcacttctttcttttttcctaagtataaaaatatatgactactactactgtgagactatgtgattgtgagaatgaatgattcttttttttttttttttttttttgaaacggagtctctcgctgtcacccaggctggagtgcagtagcacgatcttggctcactgcaacatctgcctcccgggttcaagcaattctcctgcctcagcctcctgagtagctgggactacaggtgcgctccaccacccccagctaatttttgtatttttagtggagacggggtttcaccatgttggtcaggctggtcttgaactcctgacctcatgatcctctcacctcggcctcacaaagtgctaggattacaggcgcatggccaagaatgaatgattatttgtgccttcctatgtgaaaaaaaaatgtttcctctagctacacactattctgttctgtgaggccgccccatcagactgttgacctagagtcccaaccccggccctccaggagacctgcctgttcttagaagcccaacccactcagcagcagctccaaataacagggggagccaacaaaaaagagtgctgctagagcaacaagcaaggggcaattagtcagaaggcaacttccatggtcttccaaaaaaaattgaggtgaaagaccaaagatgtccctaaaatgtcttcctaaaagataaacttcatcaactacctctgactggtcagtattaagaaccactttcaggccaggtgtcatggttcacgcctgtaactccatctactccagaggctgaggcaggacaattgcttcaggccggaggattgcttgaggccaggagctggagaccaagcctgagcaacacagtgagacctcatctctaccaaaaatgtacctctattaaaaaacaaaaaagaagaagaagaagaagaagaaggagaggaggctgggtatggtggctaatgcctttgtaatcccagaactttggaaggctgaggcaggagaatcacttaggctgaggcaggagaatcaccagagtctaggagtttgagaccagcctgggcaacatagtgagacccccatctctacaaaaaaaaaaattcaaaaattagccaagcgtggggtttgtgcctgtagacccaactactcaggaggctcaggtaggaggatcacctgagtccagggaggtcgaggctgcagtgagtcatgattattccactgccttccagcctagactacagggtgagaccctgtcttaaaaaaaaaattaaagaagaaaaaactctcttttcttttctttctttcttcttcttcttttctttttttttttttctttttttttttttagagatggcacgtcaccacattgcccaggctgttgtcgaactcctggcctcaaacgatgctcccacttgagcctcccaaagtgctgggactacaagcataagccaccacacacggccttttcctttctttttctatttctcaatggatttttccaatggacacgtatcactttggtagttatacatgatactagttgtaatctcagccatttttcaacccagcaaatgtctattctaggtcaaatatgtctcaaaaattactaaaagaaaatcagttatgtcctttaacctggctgaggtctggctttgttttctctcatgtaaaaatggagatggcacaaaacaactccaagctgttacttgaaagtaacacctcaggtgatgtcaccagcctgagggagagtgaggttaagttctgaacccacaggcattatatctgcctggggttcacatgccctacactggactggcataatttgagagtcagatccgaagatgtggtatatccgccatctttagcaactttcaaaaactaccctatgaggtcaagctggacctacttttggttttgccattgttgtttgtttgttgttgagggttttctttgaggggcggggagtgcatgcccctgtggagagcactcatttagcttcaattagagtaatgccaaaagtgccagattcctgggaaatcagcctacaaggctcctgcgggaaggaacctccactgccagaagtccttagggcatctaagtgatcagacaccgtcagggattctttgccccgtaaaaacctacttgaccagggacacgtgccaggtaaatttccttcacatttacttcaaccttattgcatactcattttagtattaaaacctttaataaaatgctcctattccttcacactttttttctatgagatctcaaataccccttcttgctattaaaaaaaatcacttattattcaccagcccaatattttaaaagtaaaaataataagccaaggccaggagcgatgactcgcacttgtattcccagcagtttcagaggcaaaggccgaaggatcgctttaaccgaggagtttgagaccagcctgggcaacatgaccagactgcctctctacaaaaagtttaaaaaattaaccgggtgtggtggtgcactgcactcccagctactgggctggggtatcaggctgaggtaggaggtttgctttgagcccggggggatcgaggctgcagtgagctttgattgtgccactgcactccagcctgggtgacagaaggagaccctgtctcaaaaataataagaataataattaataataataggccaaaccaaatacccatcaccttctgctgtgcctcccctttccccaataaatccagtgtcttgctttcaaattttgtggttaaaaaagatgatgagtttctaagacgtgggggctaaagcttgtttggccgttttagggtttgttggaatttttttttcgtctatgtacttgtgaattatttcacgtttgccattaccggttctccatagggtgatgttcattagcagtggtgataggttaattttcaccatctcttatgcggttgaatagtcacctctgaaccactttttcctccagtaactcctctttcttcggaccttctgcagccaacctgaaagaataacaaggaggtggctggaaacttgttttaaggaaccgcctgtccttcccccgctggaaaccttgcacctcggacgctcctgctcctgcccccacctgacccccgccctcgttgacatccaggcgcgatgatctctgctgccagtagagggcacacttactttactttcgcaaacctgaacgcgggtgctgcccagagagggggcggagggaaagacgctttgcagcaaaatccagcatagcgattggttgctccccgcgtttgcggcaaaggcctggaggcaggagtaatttgcaatccttaaagctgaattgtgcagtgcatcggatttggaagctactatattcacttaacacttgaacgctgagctgcaaactcaacgggtaataacccatcttgaacagcgtacatgctatacacgcacccctttcccccgaattgttttctcttttggaggtggtggagggagagaaaagtttacttaaaatgcctttgggtgagggaccaaggatgagaagaatgttttttgtttttcatgccgtggaataacacaaaataaaaaatcccgagggaatatacattatatattaaatatagatcatttcagggagcaaacaaatcatgtgtggggctgggcaactagctaagtcgaagcgtaaataaaatgtgaatacacgtttgcgggttacatacagtgcactttcactagtattcagaaaaaattgtgagtcagtgaactaggaaattaatgcctggaaggcagccaaattttaattagctcaagactcccccccccccaaaaaaaggcacggaagtaatactcctctcctcttctttgatcagaatcgatgcattttttgtgcatgaccgcatttccaataataaaaggggaaagaggacctggaaaggaattaaacgtccggtttgtccggggaggaaagagttaacggtttttttcacaagggtctctgctgactcccccggctcggtccacaagctctccacttgccccttttaggaagtccggtcccgcggttcgggtaccccctgcccctcccatattctcccgtctagcacctttgatttctcccaaacccggcagcccgagactgttgcaaaccggcgccacagggcgcaaaggggatttgtctcttctgaaacctggctgagaaattgggaactccgtgtgggaggcgtgggggtgggacggtggggtacagactggcagagagcaggcaacctccctctcgccctagcccagctctggaacaggcagacacatctcagggctaaacagacgcctcccgcacggggccccacggaagcctgagcaggcggggcaggaggggcggtatctgctgctttggcagcaaattgggggactcagtctgggtggaaggtatccaatccagatagctgtgcatacataatgcataatacatgactccccccaacaaatgcaatgggagtttattcataacgcgctctccaagtatacgtggcaatgcgttgctgggttattttaatcattctaggcatcgttttcctccttatgcctctatcattcctccctatctacactaacatcccacgctctgaacgcgcgcccattaatacccttctttcctccactctccctgggactcttgatcaaagcgcggccctttccccagccttagcgaggcgccctgcagcctggtacgcgcgtggcgtggcggtgggcgcgcagtgcgttctcggtgtggagggcagctgttccgcctgcgatgatttatactcacaggacaaggatgcggtttgtcaaacagtactgctacggaggagcagcagagaaagggagagggtttgagagggagcaaaagaaaatggtaggcgcgcgtagttaattcatgcggctctcttactctgtttacatcctagagctagagtgctcggctgcccggctgagtctcctccccaccttccccaccctccccaccctccccataagcgcccctcccgggttcccaaagcagagggcgtgggggaaaagaaaaaagatcctctctcgctaatctccgcccaccggccctttataatgcgagggtctggacggctgaggacccccgagctgtgctgctcgcggccgccaccgccgggccccggccgtccctggctcccctcctgcctcgagaagggcagggcttctcagaggcttggcgggaaaaagaacggagggagggatcgcgctgagtataaaagccggttttcggggctttatctaactcgctgtagtaattccagcgagaggcagagggagcgagcgggcggccggctagggtggaagagccgggcgagcagagctgcgctgcgggcgtcctgggaagggagatccggagcgaatagggggcttcgcctctggcccagccctcccgctgatcccccagccagcggtccgcaacccttgccgcatccacgaaactttgcccatagcagcgggcgggcactttgcactggaacttacaacacccgagcaaggacgcgactctcccgacgcggggaggctattctgcccatttggggacacttccccgccgctgccaggacccgcttctctgaaaggctctccttgcagctgcttagacgctg

SEQ ID NO: 13724 - DNA, 24 bp, Artificial
  Synthetically generated peptide
cacgcacgcgcatccccgcccgtg

SEQ ID NO: 13725 - DNA, 20 bp, Artificial
  Synthetically generated peptide
accggcgctcggcgcgcgga

SEQ ID NO: 13726 - DNA, 20 bp, Artificial
  Synthetically generated peptide
gacgcgccgggccgggcgga

SEQ ID NO: 13727 - DNA, 21 bp, Artificial
  Synthetically generated peptide
ggcgcgcggggccgggccggg

SEQ ID NO: 13728 - DNA, 34 bp, Artificial
  Synthetically generated peptide
gggcgcctcgctaaggctggggaaagggccgcgc

1. An oligonucleotide that hybridizes to a non-coding region in or upstream of a promoter for a target gene, wherein the oligonucleotide comprises:
a length of 20-34 bases;
at least one CG pair;
at least 40% C and G content;
no more than five consecutive bases of the same nucleotide; and
at least one secondary structure for said oligonucleotide.

2. The oligonucleotide of claim 1, wherein said oligonucleotide comprises a C and G content of at least 50%.

3. The oligonucleotide of claim 1, wherein said oligonucleotide comprises a C and G content from about 50 to 80%.

4. The oligonucleotide of claim 1, wherein said oligonucleotide comprises at least two CG pairs.

5. The oligonucleotide of claim 1, wherein said oligonucleotide hybridizes within a CG region, CpG island region, nuclease hypersensitive site, or CIS regulatory region.

6. The oligonucleotide of claim 1, wherein said non-coding region is located within a CG region, CpG island, nuclease hypersensitive site, or CIS regulatory region.

7. The oligonucleotide of claim 1, wherein said oligonucleotide is a reverse and full complement of a sense strand of said non-coding region of the target gene.

8. The oligonucleotide of claim 1, wherein said oligonucleotide is unique to the nucleotide sequence of the non-coding region.

9. The oligonucleotide of claim 1, wherein the nucleotide sequence of the non-coding region is not duplicated in a genome comprising the target gene.

10. The oligonucleotide of claim 1, wherein the nucleotide sequence of the non-coding region comprises less than 80% homology to other nucleotide sequences in a genome with a target gene.

11. The oligonucleotide of claim 1, wherein the nucleotide sequence of the non-coding region comprises less than 50% homology to other nucleotide sequences in a genome with a target gene.

12. The oligonucleotide of claim 1, wherein said oligonucleotide comprises at least four bases in a linear section of the secondary structure.

13. The oligonucleotide of claim 1, wherein said oligonucleotide comprises at least five bases in a linear section of the secondary structure.

14. The oligonucleotide of claim 1, wherein said oligonucleotide comprises at least one CG pair within the first 40% of the bases of said oligonucleotide.

15. The oligonucleotide of claim 1, wherein said oligonucleotide comprises at least one CG pair within the first 50% of the bases of said oligonucleotide.

16. The oligonucleotide of claim 1, wherein said oligonucleotide further comprises at least one CG pair that is prior to or in the nonlinear section of the secondary structure.

17. The oligonucleotide of claim 1, wherein said oligonucleotide comprises a linear section before a secondary structure, no oligonucleotides that extend beyond the secondary structure, and at least one CG pair within the linear section or the secondary structure.

18. The oligonucleotide of claim 1, wherein said oligonucleotide has a linear section before a secondary structure and no oligonucleotides that extend beyond the secondary structure

19. The oligonucleotide of claim 1, wherein said oligonucleotide does not comprise a single G or T base after the nonlinear section of the secondary structure.

20. The oligonucleotide of claim 1, wherein said secondary structure comprises at least one hairpin loop.

21. The oligonucleotide of claim 1, wherein said secondary structure comprises at least two hairpin loops.

22. The oligonucleotide of claim 19 or 20, wherein said secondary structure comprises at least three nucleotide bridges in the nonlinear section of the secondary structure.

23. The oligonucleotide of claim 1, wherein said oligonucleotide comprises a theoretical ΔG between −0.1 to −7.

24. The oligonucleotide of claim 23, wherein said theoretical ΔG is between −1 to −5.

25. The oligonucleotide of claim 1, wherein said oligonucleotide comprises a theoretical ΔTm between 30-70 degrees Celsius.

26. The oligonucleotide of claim 1, wherein said oligonucleotide begins at the 5′ end with the bases selected from CG, CGG, CGC, CGT, CGA, GCG, CCC, CCG, GTC, TCC, TCG, ACG, CAC, CAG, GAG, AGA, GAC, GAA, AGC, or GCC.

27. The oligonucleotide of claim 1, wherein said oligonucleotide ends at the 3′ end with the bases selected from CG, GCG, GGC, CGG, GCC, CGC, CCG, ACG, TCG, GGG, TGC, CCC, GTG, or CTC.

28. The oligonucleotide of claim 1, wherein said non-coding region is located less than 7000 bases upstream of the coding region of the target gene.

29. The oligonucleotide of claim 1, wherein said non-coding region is located less than 5000 bases upstream of the coding region of the target gene.

30. The oligonucleotide of claim 1, wherein said non-coding region is located less than 3000 bases upstream of the coding region of the target gene.

31. The oligonucleotide of claim 1, wherein said non-coding region is located less than 1000 bases upstream of the coding region of the target gene.

32. The oligonucleotide of claim 1, wherein said non-coding region is located less than 500 bases up- or downstream of a transcription factor binding site or translocation site of target gene.

33. The oligonucleotide of claim 1, wherein said non-coding region is located less than 100 bases up- or downstream of a transcription factor binding site or translocation site of target gene.

34. The oligonucleotide of claim 1, wherein said oligonucleotide does not comprise a CpG Coley motif.

35. The oligonucleotide of claim 1, wherein said oligonucleotide does not form a triplex structure.

36. The oligonucleotide of claim 1, wherein said oligonucleotide does not form a G-quadruplex structure.

37. The oligonucleotide of claim 1, wherein said oligonucleotide is a single stranded DNA.

38. The oligonucleotide of claim 1, wherein said oligonucleotide hybridizes to an Sp1 motif or transcription factor binding site.

39. The oligonucleotide of claim 1, wherein said target gene is selected from Survivin, Beclin-1, STAT3, HIF1A, IL-8, KRAS, MTTP, ApoC III, ApoB, IL-17, MMP2, FAP, P-selectin, IL-6, IL-23, AKT, CRAF, Beta-catenin, PCSK9, MEK1, MEK2, CD4, WNT1, Clusterin, NRAS, EZH2, HDAC1, PD-1, TNFα, MIF1, TTR, HBV, HAMP, ERBB2, PARP1, ITGA4, APP, FGFR1, CD68, ALK, MSI2, JAK2, CCND1, or selected from Table 2.

40. The oligonucleotide of claim 1, wherein said oligonucleotide is selected from the group consisting of any of the sequences disclosed in Table 3.

41. The oligonucleotides of claim 1, wherein said oligonucleotide hybridizes to a hot zone of a target gene.

42. The oligonucleotide of claim 1, wherein at least one of the cytosine bases in said oligonucleotide is 5-methylcytosine.

43. The oligonucleotide of claim 1, wherein at least one of the cytosine bases in said CG pair is 5-methylcytosine.

44. The oligonucleotide of claim 1, wherein all of said cytosine bases in said oligonucleotide are 5-methylcytosine.

45. The oligonucleotide of claim 1, wherein said hybridization of said oligonucleotide to the non-coding region modulates the target gene.

46. The oligonucleotide of claim 1, wherein said hybridization of said oligonucleotide to the non-coding region of the target gene modulates expression or transcription of said target gene.

47. The oligonucleotide of claim 1, wherein said hybridization of said oligonucleotide to the non-coding region of the target gene modulates a cell signaling pathway.

48. The oligonucleotide of claim 1, wherein said hybridization of said oligonucleotide to the non-coding region of said target gene produces phenotypic changes in a mammal.

49. The oligonucleotide of claim 1, wherein said hybridization of said oligonucleotide to the non-coding region of said target gene influences a non-gene target due to a chromosomal rearrangement.

50. The oligonucleotide of claim 1, wherein said target gene is on a chromosome of a cell, and wherein said hybridization of said oligonucleotide to said non-coding region reduces proliferation of said cell.

51. The oligonucleotide of claim 1, wherein said target gene is an oncogene.

52. A composition comprising an oligonucleotide according to any one of claims 1-51 and a pharmaceutically acceptable carrier.

53. The composition of claim 52, wherein the pharmaceutically acceptable carrier is a liposome.

54. The composition of claim 53, wherein the liposome is an amphoteric liposome.

55. The composition of claim 53, wherein the liposome comprises a neutral lipid.

56. The composition of claim 53, wherein the liposome comprises a mixture of neutral lipids and lipids with amphoteric properties, wherein the mixture of lipid components comprises anionic and cationic properties and at least one such component is pH responsive.

57. The composition according to any one of claims 52-56, wherein the composition further comprises an additional therapeutic agent.

58. The composition of claim 57, wherein the additional therapeutic agent is a second oligonucleotide, chemotherapeutic agent, immunotherapeutic agent, or radiotherapy.

59. The composition of claim 52, wherein said composition has two (2) therapeutic agents.

60. The composition of claim 59, wherein one therapeutic agent treats a cancer disease and the other therapeutic agent treats a non-cancer disease.

61. A method of inhibiting protein expressing in a cell with a target gene comprising introducing into said cell an oligonucleotide according to any one of claims 1-51 or composition according to any one of claims 52-60.

62. A method of mediating target-specific RNA in a mammalian cell in vitro, comprising contacting said mammalian cell in vitro with an oligonucleotide according to any one of claims 1-51 or composition according to any one of claims 52-60.

63. A method of mediating protein down regulation in a mammalian cell in vitro, comprising contacting said mammalian cell in vitro with an oligonucleotide according to any one of claims 1-51 or composition according to any one of claims 52-60.

64. A method of treating a patient having a disease characterized by the presence or undesired production of a protein implicated in said disease, comprising administering to said patient a pharmaceutically effective amount of an oligonucleotide according to any one of claims 1-51 or composition according to any one of claims 52-60.

65. A method of treating a patient having a disease characterized by the presence or undesired production of a protein implicated in said disease, comprising administering to said patient a pharmaceutically effective amount between 1 mg/m² and 500 mg/m² of an oligonucleotide according to any one of claims 1-51 or composition according to any one of claims 52-60.

66. A method of treating a mammal having a disease characterized by the presence or undesired production of a protein implicated in disease, comprising administering to said mammal a pharmaceutically effective amount of an oligonucleotide according to any one of claims 1-51 or composition according to the description and the compositions in any of claims 52-60.

67. A method of treating a plant having a disease characterized by the presence or undesired production of a protein implicated in disease, comprising introducing to said plant an effective amount of an oligonucleotide according to any one of claims 1-51 or composition according to the description and the compositions in any of claims 52-60.

68. A method of administration of a therapeutic disclosed herein and a oligonucleotide according to any one of claims 1-51 or a composition according to any one of claim 52-60, wherein said administration is through a route selected from oral, vapor, inhalation, dermal, subdermal, subcutaneous, parental, parenterally, ear, nose, nasally, bucally, eye, otic, ophthalmically, rectal, vaginal, suppository or implant, implanted reservoir, dermal, dermal skin patch, injection, or sub-lingual.

69. A method or kit for a diagnosis and treatment of a disease comprising the steps of administering to a patient a pharmaceutically effective amount of an oligonucleotides accordingly to any one of claims 1-51 or a composition according to any one of claims 52-60, wherein the patient is characterized by the presence of, or undesired production of, a protein implicated in said disease, and the method further comprising evaluating said patient for the presence of, or undesired production of said protein.

70. An single stranded DNA oligonucleotide that hybridizes to coding or non-coding region of a target gene, wherein the oligonucleotide comprises:
a length of 12-50 bases;
at least 30% C and G content; and
no more than seven consecutive bases of the same nucleotide.

71. The oligonucleotide of claim 70, wherein the nucleotide sequence of the non-coding region comprises less than 80% homology to other nucleotide sequences in a genome with a target gene.

72. The oligonucleotide of claim 70, wherein said oligonucleotide comprises at least one CG pair within the first 40% of the bases of said oligonucleotide.

73. The oligonucleotide of claim 70 further comprising a secondary structure.

74. The oligonucleotide of claim 70, wherein said oligonucleotide comprises a theoretical ΔG between −0.1 to −7.

75. The oligonucleotide of claim 70, wherein said oligonucleotide comprises a theoretical ΔTm between 30-70 degrees Celsius.

76. The oligonucleotide of claim 70, wherein said non-coding region is located less than 7000 bases upstream of the coding region of the target gene.

77. The oligonucleotide of claim 70, wherein said non-coding region is located less than 500 bases up- or downstream of a transcription factor binding site or translocation site of target gene.

78. The oligonucleotide of claim 70, wherein said non-coding region is located with a CG region, nuclease hypersensitive site, or CpG island of the genome comprising the target gene.

79. The oligonucleotide of claim 70, further comprises at least one CG pair and optionally at least one of the cytosine bases in said CG pair is 5-methylcytosine.

80. The oligonucleotide of claim 70, wherein said target gene is on a chromosome of a cell, and wherein said hybridization of said oligonucleotide reduces proliferation of said cell.

81. A composition comprising an oligonucleotide according to any one of claims 70-80 and a pharmaceutically acceptable carrier.

82. The composition of claim 81, wherein the pharmaceutically acceptable carrier is a liposome.

83. The composition according to any one of claim 81 or 82 wherein the composition further comprises an additional therapeutic agent.

84. A method of inhibiting or silencing gene transcription in a cell with a target gene comprising introducing into said cell an oligonucleotide according to any one of claims 70-80 or composition according to any one of claims 81-83.

85. A method of mediating target-specific RNA in a mammalian cell in vitro, comprising contacting said mammalian cell in vitro with an oligonucleotide according to any one of claims 70-80 or composition according to any one of claims 81-83.
